United States Patent Application Publication US 2026/0258423 A1 - sequence listing, part 49

SEQ ID NO: 301568 - DNA, 83257441 bp, Homo sapiens (residues 21,348,071-23,482,877 of 83,257,441)
  source 1..83257441: mol_type = genomic DNA
caaatctaagatttgtttccataaaaagtcctgatttccagcctttcttaagaaattgaaacctagagtcaggagtgtccacccctttggcctgccttatccaccctcttgcttgagtcctgcaagggcttgtggccctggcaagaggatgtggttggggcacagatggcacatgcgttatcacaggtttctgcttctttatattctgtctggagaaaaacactggtgattgaagcacggttgccacccaacgaggcagaactgaaaggtcactgaacggtcttgaccacattctcctggttgtcaccagttgctggcagtttgcagcaatctctccacctttggaaagtcgggggtcggggggcgtccaccgccccttgctgtagctgtgccacccctaactgaaatctcgggcaggtcacttcgtcacttggtcaaggtcctccatgtttctgtgcctcagtttccttgtctggagaatgggggaaatgaacactgggctgtctagcttaggacagaaacaagagcagtcaggggctttgatgctttagggctaaacatcttactcattttcaagttatggtaagagagagaatgtttggggacgtgccagccctcagatttcagccaaacccaagctggcattcagagcctctgaggtctcggcatggacacacccagtgtccatcccttccttctccttcccctctggggccccagccacctggctttatctcccactctgcacccactcactgtgcgactcatgcttttgagcacctgttgtagaccaggcccctgctaggatgagtggcaggctgtggtttgagcaggcccctggggacgggcctgctgcaggcctagctgtgctcccatcctagcctgtcaggtgggccccatcccacccccatgggcccctgctctgaccctcaggtcatttcccagtatcctttgccctcaggcttctgcgcttggtggtggtgggggaagggggcacgtctctccttatgtctctcctcggatggcctcctagcagcggccacctgcccccaccagccccatggctccagacacccctgccgaggctccagctcccttcgcatgaacacagcccctgggactggtgaccctgttgctttcttccctgcctccagcctgggatggcggcttcctgctgatttcaatcctggattcctcctcatcccgtttagctctcagagcctttatcacagtgtgaccagctccctagacgcaattctctctgttggagagaactggagggcttctttttcctggctggatcctgcctgattccgtggccatgtcctgactgcacagatcagagtggtctggctgtgggcctctttccttgcctgaatcatgagcttcctgaggacgaggactgatgggcttcttccacagtaacagactcagcttcgaggaggcctcagtgatgtcacacctcatgatgtcagctgataccacttctgcagcaggcacagccagggccagtcaggcagctccagggcatgaagggtcagtccctacccccagccctgagcatcacctagtggcaggggaggccaagagggagacccctggcctgcagtctccagggcagagaatcagcccagtcagcagggcctgctatgatctctctcttgccctctcagtactggctgaggaggggcctggaccccagacccaggactcctcttccttcttgttcccacaggcttggggccctcacagtcgctctgggctgacttactctcaagtccagcccgttcctaggaccaggtgtttggagctcagagggtttgttttatggccttgactctcatcagggcctgtggcagagcccagcttcccctactgaagcctcttacacagctggacacagacccagctacacaagggtgcacagggacacagacacaactacacacagatatgtacatgtgcgcacagacacacatgggtatgcacaacacagacacacagggacacatacagtcacacatgagtacacacagacgcggacacatgtgcacacatggacacacatgatcacatacagacacacagggacatacaatcacacatcagtacacacagacacacatggacacacaggcacacacatacagacacatctgcataggcacacacacatatacatggacacacaaatatagataatagagacatacatatctatacctgcatagatacagagacacagacatgcaaatacagatacgcccagacacacacacgcagcctggggctgtgatggggtaatgccgggtgcctggtgtcctggcccagcctggtggggcggcaggcctgagggtgagtcccttcaccccattagcgatgcattttcagaaatacagaggcagcaagaagaggccaaagccttggccagcatccgggtggtttcaggtgacatctgtcatacggagaaacacgcctcacggttctcctccacctccccgatggctgccctgcagctcacaggccctcccagacgccctttccttttcgcaccatcagtgtctccgcctttccacaccatcagtatctccgggttgaggctgttgaggctgcaggcccccaggcacgtgccagatgcggacgctgtgggcatttccgctcagctgcaagaacagcgccactgaggcatccagaggctgcaacctccaccagcaacagtcacgtccgtggtgtttgtgcttcactacaagtccctggccagcaggctggcacgtttcattttcattttcgtgggcactgtgcacggccccatgttcacaggaatccaggcacggagtggacgtcccctccctgccgcatccccagcctctcggttctctccagaggtcagcgctggattgtttgtgtgtcctgctggagactcccgtacacacagcattgctatgacatcttttttgtggttcttttttgttttgttggttttttggttttggtttttttgagacagagtctcactttgatacccaggctggagtgcagtggtgccatcacagctcactgcagcctcaaactccagggctcaagggatcctcccgactcagcctcctaagttgctaggactacaagcattagccaccacgtccagctaattaaattttttttttttttgtatagacagggtcttcctatattacccatgctggtctcgaactcctgggctcaatcaatcctcctgccttggcctcctgtagtgcttgggattacaggcttgagcctctgtgactgggcccttttttgtggttcttattttgaacagaaaaggtagcctgtgtggacactgctctgcacccttggttttgcaaacctgatgcattggggaagtgtctcatgtggtgacaatggagctgcctcttcttttttcctggctgtctccccttcaacagtgtggatgtccccacacattatgcaccccgccccatggtggcatcctggttatgcagagaggctgcagtcagcacccttgctcagggacctggttatctgtgagtcaaagtcatcagtaggtctggggacactccccatgccactctggggtctttgacaacctgatgggtgaaaaatggcacctccagttagattgaatttggtttacacttttaagagtgagcagtatggttttggggggtggagagcagggcccccaggccagtggtcagttgttgcagggggtgggacagcactaaccacgcccagggtgggtggggccccttgccccccaggttggtgttgaggacaggcaaagcttcctgaaagagcttcttcactgggccatggggcgggtgaaggatttcctcaggggaggaagagagagagggttccaggcaatggaacagcacaggcaaaggcagggctccctgaaagtctgcctgaaagtcagggtgggtttagggagcagagggttgccaacttggtgggaggggacatggacaggccatcttgcccagagccccagtttgtcttctgggcactggggagccaagtcaggagagggaggagggagggccaagggcagggtcttcttcatccgggggaggaagagacaagcagaggcaaccctaataaacgaggcctgtccccccagcaaataatgaacccggatggagcagaggccgatgttttattcatggccggcacagggcaatcaattacccacccagccgctgcccggcactgcctccatcatcctgccatcctgcgctattttgggcttgggctgggcctcgcctcccctgtcatccaggccttctccccgcctgggcggggtgcgctcatcctggctcagggtgacaggccagaggggcagagaagccacgggtccaatctcactgagtatttgggtaaactgaggctcagcgaggtgcaatgatgtgacaggctcccacggtttcggggaactgggctttcatttcccccagtgcagcccctaggccggtggtcgggggaggattcttgttcccatttcacagaaggggatgtggaggacctcaggtgtcagaggacgggccccagatctttgtgcccacagagcagcctctgggaaatggtggcagccttcctggatttccggcagggtgagctacctcgaaccccagaacctcaggggtcctcagagagggggaggaaattcacctgaggctcacagcatggccctggcggggaggggagaggcggtgggatgagcaagagttgatttattgtgactgtgcttgtgacatctaggctgctgagttgctgggcctggctcattctcgccaaggacaagcccaccagctctgccgcccagtgtccctctccctgtttggcctctgcagggggtgagacaaacctgagggcagcaggagtccacacagccatctgtttctggggcctgcaggcttctcaaagcggggattctctggctcctggggtggctgagcgcccaccatgctccaaactctggggctctccagcaagccgttcctggcatcagactccagccccgagtctccccactgtgagaggaacatgtcctagagctggtgtgggaagagcatgcccggctcgtgtggtcacctcagccctgcatccaatttgatttccctccatcccattttccacgtacgcactggcacatttgtgccaccacatggcccagtgatcgcatacacaggtgtgtacacccaagagaaatgaagacaggcgtctaaacaagcaccaccacagccatgttcacacagggctgctcactgtcgccaaaggtggagatatcctaacatccgtcacctgatggacgcaaagtgaaacacggtctgtccacacagcagagcatcatgcaatcatcacaaggaaggacatgctggtctatgttgcaacacggatgagcctcacagcatcatgttgagtgaaagcagccaggcgcaagagcgtgcatgcaggatttcattcacaggaaacaccagtggacaactattctcaaattcattcattccaccaggtcactgagtgcctactgtgtgccaggcactgtgctgggcactgggggtaagcaggtcccagaacatccgtgtcccaggggagcaacattctagtggagaagacaaaggcaaaagtgccagcgtgttcgcagagaaattcacagagacagaaagcagattggtggttgccaggggctgaagggaggggaaatggggacagggttttctgttgcggtgatgaaaatgtgttggaactagataaaggtggtggttgcacaacattatgagtataataaattccactaaatgattcattttaaaaaatacattttaaaaatagagacagaatattgttatgttgcttaggctggtcccgaactcctggcttcaagcaatcctcctgcctcggcctcctgaagtactgagattataggcatgagccactgcacctggcctgttcactttgaaatggttaattttacattatgtaaatagtaccttaattaaaaaaaataaacctgcccggcacggtggctcacgcctgtaatcccagcactttgggaggctgaggtgggcagatcacaaggtctggagttcgagatcagcctagccaatatggtgaaaccctgtctctactgaaaatacaaaaattagctggttgtggtggcacacgcctgtagtcccagctacttgggaggctgaggcagaagaatcgcttgaactcggtaggcagaggctgcagtgagccaagattgcaccactgcactccagcctggcgacagagcgagactccatctcaaaaacaaacaaacaaacaaaacaacaacaaaaataaacccatcagagagaccatcttgcccctgcttaaaaccttccagctgttccccatagaacaaaaatataaagttcaagtcttgtgctgtggctctcagggtcccgtgatctggcttagcctctccctgactcggggccagcgctctgtttctctgggctctctgtgtgagtggccatgctctgtcctgcctccaagccttgtgcctgctgaccacccccactcagaatggaacactctttttccatctctgcaccagttttcacgtctcctgtcaaacatccctctttggagaggccctcactgacctccctggctaagtagccgctcacgcctcattcgccaccctgctaccctgaccttcataccttgacctctgcctgaaactgcctcctctgaagtttacgcatctccatttttgttgtctgtctcctgcacaagaagatcagctgcacaagaacaggggcttttgtctcttttgtgccctgttatgtctccaatgcccagatcggggactggcccagagcaggtgttcagcaaaggaatgaatgaatgaatgaatgaatgaatggaagttggctcccatctttccagccctgcctccaacacctccagcgagactgtggttcctcttctcacagtggattcccacccccaagccgagcccagggcccctcgcgggcatttggtgaagttatggccgtgtcctgttgcccttgcgttaatgctgcagtgtctggcctggtttcccagttctttcccttccccagccggcccagctgtcaattcccaccaccctcaacccccatcaccaatgccggtgcttgcgcccaccacagacaggtcccacttccaggccctgtgcctacctgaggccactgtgaggcatgtggtgagactgaccttgccggcaggatttgaggggagccaagaagccagcttgggaggcatgacaaccgcagtcatggatgttgccacgaggacctgcatgtccttcactattatccctcttgacccctggttgggtgataactgaccttatttttcagatgacaaaattgaggctcaggaaagttaagattgtgctccaaggtcacagagcagggaagggacgagctgcaatggctgctgcacttcccttatggtaatagccttattattcctgttgctgctgctgggtcctgggctccatctccaggagcctttcccctcggcccctcccacccctccagagcctcaggccactcttgctgaataagggtctagccatttactgacctggggctggtcctcatctggaaagcgggatggtgagaggcggtaatgagggacctgacacgtggacgggatctgggaaacggccgtaacaggccgtcctttccttttctcagggctcctgcctgtgtggagagatgatggctccccaccactgccacctcccccacacccctgcccacccacgtctcccgctccccgggctcacagtctgggtagaggctgtttcaaacagaagaccaagcatctgcgggaatccagaccagaccctaagccagctccagagggcttcctgggggagaagagttttgacaagagtatccaaggcagaagaaacagcctgggcaaaagcctggaggtggggaaattgagacctcctggaggctgaggaaggctggagggagggaggagaacaaagggccttaaccagccatcaggtgagggcagctaggccttccccagggccacattatgactttcaagcacccagggcactttggcctaaatgagtccatttatccataaaaaataaaaacactaaatacaaaaaattagccgggcgtggtggcgggcacctgtagtcccagctactcgggaggctgaggcaggagaatggtgtgaacccagggggcggagcttgcagtgagctgagattgcgccactgcactccagcctgggcggcagagtgagactccatctcaaacaaaacacaacaaaacaaaacaaaacaaaaacactaaaaatatattctacgtcttcactggaatagagagaaatataattcgttagtcatccactcacccattcatcccctgtccatctttccgttagtcatccactcacccattcatgccctgcccatctatctatccctttgactccattcactcacctcgccaaccacccacccatccatccatccatccatctattcagctacgttccatttattcatttacccactcacccacttatccatccatccatccctccattcatccatccatccatccattcatccattcatccatccatccattcatccatccattcatccattcatccagccacttacccacccatgcatccacccattcattcatccacccaccctttcaccaattcaccaatccatccattcacccactcatttattcatccatcaatttatccatctacccacccacccatccattcacccattcatctatctgtccactcactcacacatccatccatcttacccacccacccatccacttatccattcatctatctatccattcattcatccacccaccattcatctacccatccactcaaccatgcaccttctcaccaatcccccacccatccattcatccatcaattcatccatctatctatacacccacccatccactcatccatccatccatctttacatccctcttagcactcctgctcaccccattcaattgtctgtttccctgtaaatatactcacccgtctgcccactcatccatctactcatattccctctgtttccattctccattatttactatatcagcctctgcagtcatctcttttctctggagatttctctagcatctgatcccgaccttcccatcataagccctctcttcacttcccattgctcacagatacaaatccaaacttcagacttagctggctttcaaggccctgaaactattttgtctctcctctcactgctcccaccacggatcctggaagttgtgtgggccctgggcactgtgcctactgtgccctccctggctttccctgccagctgcggcctgtgcctatgggcttgagtccagagaggagaagtgaaccatgaacttgggaacaagaggggaaaaggtgaacaggaccagattaatgcaccagcctcagctccccgcctgtaatgaggggatggagtgccgatgtcctcccccacattctaggctggtttctgggctcactgagctgccttgagggccaaggtggtggggataatggagggggctgatcactcttccctctctcctgccacttaccccttaacagcctagccgatctggaacagaagggaagggcctgctgtgggaggggcagccccattagcactgtttctggcccctagggagccaggggtcaccagagcccagctgcagggccattagcagcccattagccctgcccctccttcccagtccccactctggctccattcaggacctgcccttcacggcagagcttctgccccttcaccaacccctgcaggcctcagaggccccctccgaggtcaacgtgtcaagttccggtcagcctgggcagggctgcagctgacccttgcagagctggggaggacaaaggaaagggaacccctgcaggtgtaagtggctggaccctctgaaagggcttcatccatctctgaggcaggtggtaatggctagtggagaggtgtgtaagccatggggccagcgagtcaggtgcctctgtcgtctttgccaagaaggggttgcattgctgatttctgactcccctagtgtatgtgagttgctttttacggaggagctgtgccccctcagtcaatcaatcaacacacttttgcttgctgagctaacaaagtattggacctcgagagggagagccaagaccttaggctctcctggttacataatccattcattcactagcagatattcagtgagtgctcactgtatgccaggccctggagcacagcagcaagagacactccagtagaggagaggacagtaaacacagaaaacaatcagtgggacgatttctggaaggaaagggctgtgcaggagatgaagcaggcatcatgagacaggcatggggtggctgttgtagtctgagggtttggggaggcctcttacaggagacctttgagctgagcctgggtggtgagaaggagcctaccaagtggagggcaaggactgaaggtcacaggcagtgggacagcaagtgcaagggtccccgagatggggacagaagctagcaagccctggaggctgggggagggggagggaggtgggaggtggcagagggaggtcatagattctcactgctatgccaagccttgagggctcaggtctgattccagtctcccagaacttccttggctgtgcatggggctcacaggggcagcagggaggcctgcagggggtggccactgcctgagtcctggtgagcaaccatgggggctccgacctggtggaggtagcaaaggagggacttgcatctgctgaggtctgagcagccaggagtcagaatcttgtgaacctcagaatcagactctcagcattagaattagaattaggagctcttagccctgacatttgaggctggcgggaagctcagtggggaccgcacaatctgggctgagccacaccctaaagccagctatctcacccggaaaacattccaggctgtgaagggctggatccagcctgactcgtgctaagtgcttcacacatgtactatttgttcctcatgaggacctgatgagacagatgccattcttctccccatttcctagatgaagtcacttgttccaggtcactaagggagggatagggtcctccttccccaggggcgcctgacctctgggtggggtcagcgtgggaagggggaaggcgtggcagaaagagagtgtgcctggaacagtatttttagcgctgcctgccctgcgtgcgaggggaggggaattagagatggctttcagggcaggaagagcatgaagtgatgtcttaattgggatcctcaaggagaaaaacagtgttacaagcgctcaattattttataatgagcctgcggtgtgcagggagagccacagacattttcgaagctgaagtgtgcgcctgcatgtgtgtgtgtatgtgtgtgcatatgtgtgtgtgtgcatgtgtgcacgtgcatgtgcccacaggtgtatggtgctgaagcgggactgtggcagggtgggacgggctctttctcctgattttgagcagtgggcccctcacttgtgctgccttctgcccctcaagcctcttgtggtgcccccgcccaccaagtcgctcccacaatgagccaccagtgagagaacttcaggttttgctgggcaggaggatgctggagcctcaacaggccctccaggaaggggagaccttggggaatttccactaagcttcaagacctttctctttgctgagtagaaaggggactggttgtgagcatcatgctgagcacagggagagggctgtgctgggaaggaaggacccacactcagctccatcggggccaggacccagctgaccaccctgccacagttccccacagccctcctgatgacgccccagctcaccgggggaacttctgtgacctgcctgctgccccatgatgaccctgccccatgctcatccagccagattcctgcctccaggcctttgcctatgctttgccaccaccttgtctctgttcagggctgaaaagccttctgtctcttccttcgtggcctggttcaactgcttcttcctctttagcaaagcccttgtgtttaacctcaccccagcagggagtccccagcacggtccctgcgtaaatcagctcctgccaggccacttggtcagcgcatctcgttaacggaggctgggctaaacttgaggaattctgaaatgaaggtttccacagcagtggggtagagatcagactctttcccctaggtgctttggggagagctcagccccccaacatagtgaccctgagctgaggcaaagcagaacaggacattagtgtttctatttcacattgaaaaggttaaatttcaaactaacttttgaaaacatgatttttgtcttcactgctacagataggaatgaaacagtggctgggaaatgggaagtggacagagaagcattgctgaaaggggcttgggaactggccccagggtcctccacttccccatctgtgaaatggagactctaatgatgattgtcttcctggtccccaggccaagatgaggcctccagggagggagaagctctcattactgaggctcagcagttcctgagagtggctgtaatggcattgcgggggtggcaggggcagcagctcagtgtctctagacagggttgggggccccttggagtccttcccactgccctccccagccttagggaccaggtatctagatgcagctgctggagtggatggaaggacttcctgacctccagcaggagcggaggtctccagcgctgtcacccgaggcccgtagaggctgggggctgcagcttgaggctgtcggggcctcagagctctgggtggggagcattatacaatttaacaagctggagagtggggctcccagaggcctgggaagaggataaggagggagcccccggcctgtgacctcagtcactcactagccattcttttctttgctcactgattctcttgttcttatcatctgttcctcccccaccttcatctcagcaaatgtttcccattgcctttcatagccaagcccctgctgagtgctggggatgcagacacagtctctggccttaggcacctccagttgttgggagaggcagacatgttccaggaaccatccaaaagtgcaagtgcagcaccagctaccctgagggcttgcaggggagccaagggggctccagaggcctctcctctgccttttgacacccaaatcggctcaggtcacccttctgtcaaactttcccatggatccactctctccagaaacaaaagcaatggctccccaaggccttgaggccccccgaaccccaccctagctcccacccccctggcccccgctccctctgttcagccacataggctttccctggagctccccacaccagtcccatctcagggccttcgcacatgctgtttcctctacctggtgctgttcccccatgctcctccctacctccttcaggtctttctcagtgaaacaactggttcaacttaacagtgcaacccctccccctgtttttctccataacacattatgctctaattcctcactcagcttgtttgttctctctctcatgaactagaactccacctgcacaagggtggggattctgttttgttcactgtcttgtccccagtagtgggcacagtgcctggcatccagtgagtgcctaacaaatatcacttcagtgattgacttattgattaattacctgcagggcaggctgcctactccaaggttgctagcctggagtggagagtaagggctgaggggtggatggctgccctactccctcctctttcttcttctaccatgtgagccttgaggcctcttctgggtccagtgtagaaggtgaatatccagctaagtttgacatttagtttgactgtgtcagcagtggggggcagagaggggagctgtactagaagggttgggatcagatgctagaaaagtctctggaagtgagagatgagtgagaaagcccatgctgtaaatgacgaagaaaggaaacttataggcagatggatgagcagacagatggatgagtggagaggtacatgagtagatagatgaataaagagatggatggatggatgagtggataaatggataagtgggtgatggagaaatgggtggatggatcaataggtgaatgaatggatgaatggatggatggatgatggatgaatgaataaatgagtggatggatgaatgggtgaatagatgaatgagtggatggatagattagtggacagataaaggagaagatggatggatgagtggacaaatgcatgaaaagatgcatggatggatggatgatggatggataaatggatggatggatggatggatgaatggatgtatgtatgagtgaatggatggatgaaaggtgagaggacagatgaatcagtggatggatgaatggatggatagatggatgagtgaacagatggtgagatgaatggatgaatagatagatgggtagatggatgagtagatggatgagtggactgatggatgatgaatggatagatgggtggatggatgaatagatgaacagatagatggaagaattgttagatggctggatgaatgaatgaatgagtggatggatggatgtgcagatggatggaggagtggatgaacagaggatgaatggatggatgggtggatggatggatgagtggatgaatggatagatgggtggatggaggaatagatcagtgggtggatggatgagtgaatgaatggttagttagagggatggatgggtgatagatgaatggctaaaaaagtaggtggattaatgggtgaacagatgaatgagtggatggatagatagatagataaatggatgggtgggtggatggatgagtgaatgaatgcatgagtggacaggtggatgtataaatgaatgaatggataaaagtggatggatgaatggacgagtggatggatggatgagtggacagatggacggatgagtgaatgggttgatagatgagtgaacagatggaggagtggttcaatggatggatagatgaaaggatgagtggatggatagatggatgggtggacagatggttggatgaatggatgaataaatagatgggtggatggatggatgattggatgaatgaatggataagtagatagatggatgtgcagatggatgaatgagtgaatgaatgattggatgagcggatggatggacaaatgtgttgctagatgagtggatgtgtgtatgggtgaaagaatggatggaaggatcaatcaatgattggatgggtgtacagatggttaggattattatgataataatactaataaatcatttattgagtactttctgtggtccttgtctgtgctttatgtaatcaatctcatttaaaattctcattacaacattttgagggagatatttcttttctcattttacagatggaaaaactgagtcttaatgtgatggaatggcttaacaaggtttcatagcttatgagaggttgaggctagatttgtactcaggtgagcttagcccttagctgtcttgctgttcagtatggggtctcccccacatagataggcatatcctgaggacaggcaccctgtgtgggcatctgtgaagcacccactggcttgccttttggggaggaggcctctgggaagatctctgggcttcaatataatgtttacagctacatttggccccagaggaatgagatgggggagccacgcgcccacagtccttcatactacactggcagctggtggcaccatccacagggaagacaatgtgggcaggagggcagctggcatgattcaccagagacgaggggagccctttccagctggccccatggttcccagggcctgtgctccagacaagggcagtggcgcagaggccagccctgcagatgcaggccttgctgcctcagcctggggcctgcaggtaaaactggtgacctaatctgaactggctcacaggaagctggggccgcatggtgagatagtggatggaaagtgctagccacagggtaggtgctggggaaaggatgagagggtggggagggcaaattttaaataagatttccagaaaaggcatctccctgagaagagacatttgaacagagacctgagggtggtggaagagtgagccatgcagagatctgggggcagagtatttggcagagggagcagcaagtgcaaaggcgagggagcagcaagtgcaaaggccctggggtaggcaggacttgatgtgttcaggaataacaaggaggtatgagaggaagacggacaggagataagatctcaaggtaatggcagcctggagactgcggctgagctggggtcatgggagggttagcgcagagggttttaactggctccccaagggtgtcatgtgcaagcaagcagcagcccctctcctgggtgctttggggactcagccctgccttcccacttccatccatccctggtttccccctgtggaggcttcagggagctggtggctgcctcaatcagatctagacaaaggctggcattaggtgcccaggagcacatacggcccaggcagacaagatagggcccgtttgggccctgagcacccagacttgagcttcaggctccaaaatgcaaggagactaggatggacacagaggcatgagccaggaaggggctgcactcagaggctccgcccagcttgtgccactgtccaggctgccttttgaaactttgtctttccatttggaaacagtttgttgatccaagtttttctctaggcaggaatccctagggtttgcatggcacaaccaggtggaaactgaaattgtttcaaaagcaaaacgatagaaatcttttctcaagctgccaatgccctccccagacaatgctgggggtgggggctatgactggggaggctgcaagggccctgcctaggaatgggggcctgggggagggggagcctgcctctcccagtgggagctatgtgctgacacaaagccccaaattccccatcttgcttccctcactgcacccattttctgtctaagccctggctcggccgaaggcccaggagagatcccaggacaatggcgcccaactctgggactgacctcgtggccccgcctagatgggcctgatctctgctgtccaacgccctaccccagcccacacaggacaagctgaccagagcaccccacccagacacccaaggctgctgctcagggacagagggtcctggctacttgtacacctcctgtgatggagtgctcactaccttcctcgttttgtgggatccagttttaactggctccccaaggctgccatgtgcaaggaaatagcagcccctctcctgggtgctttggggactcagccctgcctccccacttccatccacccctggattcccctgtggaggcttcagggagctgatggctgcctccgccagatctagacaagagttggcattagaagcccaggagcacacgtgggccaggcctcttctgcagtgtgtctcactctgacctgctgggattgtaggacgatttttctttcttctgcaccagtgctgaaaagaggctgagctttggcctccaagaggccttggttccactgagcacagctccctggctcctgccactgtctctctgttcttgctgttctctcctccccaggactctgtgttcccattctggctgtgctgctgggccttttagacacgagagagccggggaacttggaccctgcagtgctttcctccagcagggaatgcagtgaggcactctgggcatcttctctgtagctggccacttcacagttatgtgaccttggacttaatggctccgtgccttggtttccctcatttgtaaattgacaaaaagtgctctaattgggggaatggggatctgggtggaaaggctgcctggagaatggagcatgctggtcccagggatgagctgaaacacctaagatttgggggcctccctaagaggcagggggtgttggaacctgcattcagctgagctgccaaatttggggatgggaggaggagttgctttctccatgccccccacctccggcattcgagacccccttgctgtggacaacccctaccctctttaccctcttgcctccctctacttaggcctggggagcctggctgggaggggctggccccaccccagctcttgttttcacttcttgccttcctcaacttctgaacaccagctccagggggctggagatggtgggcttggaggagattttggggtggccaagggcttccaagacccagccaggaggctgggcagggagtgacccctgcagccgggggtgggagggctcttaaggtagacttggaaatcgaggttctggtggtgaaagcatgaggcctcccaaggacatgaggtggacagaggtacccccaaccatgacttggctcccggcttagggctcagacatcctcttcttggtctgacctcctagaagggtggtagagatgctggagtttgtgcagaaggatgtgcaaggctgtgagagaggaagccccactgcccatggtgacagggtcaggactggctggagcgagcagagggtcagtggccagcgccgcctgctgccatccttctgaggggtctggccctttcctgacccctctgcagaatccgagtcttaatgcatccaacaacacccaagattccaaaggaagccagttattagaatggttaaatagcacgattgcgatagggtgaactgtgtgctcccttcccttacggatgcgctgatgataggattgcatggcaggtttaagcccacctgtaactttgacccagagacaaatgtgaaagacctctggaggcgtctgccagtccagagtgggatgcggacatatctgtggcctctgctggtgacagcctcaggtgtgctgatgctgctggggtttgccatctcagtccacagtggaagaaaaggccacatttcagctggatgctgacccacacttcttccccgttcccacgcacggacccctgattccgtcctggtgttccccagctctagagctttctgccgggaacagtggcagcagcagcctcagcagcgccacacacagtaaatgacagcgatgagcaacagccaccggacactgggctgagggcatccctcatgcaaccttcacccagccctgcaaggcagccactgttgtggtcctcattttgcagaggaagaagctgaggcacagagaggctaagtgacttgcccaaagtgacacagctcgtgagcgatggtgtcagggtttgaacccaagctggtctgactccagaggctgtgctgttccccttagaatgcctggcccacaagtggggtttaatggatgtttgacccatttaaagggtcattgctcaatttctgtgttcacagagggacattccctggggctgagctgggctctgcagatttacaatgggttctatatttatcatccccatttctaggtaggttaatggattttaaatggagtagatactaattgcccctgtactgtggatgggccagcctgggagagggcttgctccagccctgggactgaattccttagcacggacctgcaccaaacccagggtgaggatttgaatgggccaagacgggagtagcatgggcactcgggacccaggggacagcacgggcaagagtgtggaggtgggtcctagggacctgctgaggagccttgcacgtgtccctcataccagcagcaagtcctcctggtctagggacacagggctaggctgtcccaggagaggcacccggctccctggagcttctgcaagattcaggccatcatggcgtgtttattaatcaccacagacaggatggggttgggcctgctcagcagctccaaggggagttgggagtgggaaggaaccctgcgagaaaggagttcaggacaggtgtgaagggtgggatgtccggtccagcctcccacaggagggggagcctccctcttctctcagctttttaattaatttgaggggacatgaaatccttgaagatggtctagagatacagtggccctacagagaacagcttggcccctcgtcctccctctaacctcccagttgccctcctggtggccagtttctggcatctctttccagaatattctaccaacacacacgtgtgtgtgtgtgtgcgcgtgcgtgtgtgtatacatatgccaccttttaagcattcagtgaactatactctctcttctgtactgcgccttttactttgtcttagagcacttttcctattagagtcactcaacaaatatttcttgagcacctaccaagggctgggtgctgctttctcgaggccagaggcagctgccctggcccatggagcctaggcatggctccttcacagctgggggctgctcccatgcacccatgtgccctgtcatggttgccttcttggggatgctgggcaggtggctgctgtttcaaagatgagtccccaggtgtcgtgggataaattcctagatgtggaactcctaggattaaaaaaaaggcgatgactcttcttagcttgaccagctgttcccagattgcggttgaaacgtcagggtttaggttgtgggcagggaggttcccccaggctggtacggaggctgaagatggtgctggcatgggtggaaaagaaggtgcaggggccagaggtggcatgtggctgggaagagcctccctctgcccttgaggagcccccattgtgaggaaggagcagaagcggagaggaagagcgtccccagggagctgtggtggggaagcccaggaggctgtgggtgcccaggggaggcgagtggctggcttgggagggtggggcatccggggaggctgggaggaggcctctccacggagcacccagtgtgcgccagccctgtgctgggtcgcctcccatgtgtcatttcctgggagggttgcatcactgattcactcctccagtggataatctgagtgcctacctggcgctgggcactgtaaatagcactgggtgtgaagcaggagcctctcagcgggacatcacgcccatcctacagctgaggagactgaggctttgagggagaaggcaaacgcttgggtcctatgaatcatctccttccttcctggtccttgtccctgagagctgcttagactgtgggttctcctataaagagcagtccttccttcctggtccttgtccctgagagctgcttagactgtgggttctcctataaagagcagttctggccccagctggttcctgagaatgaaccccaggtggccaggccaagccagccctctagccctgccccagagggccagaggccagctgccagacacccatggaagctgccctggcctgacaagcctttgaaccctgctcctgtgactctggcctcctaggaccaaggtgacctgggtggttgctccagtttggccctggctcatccccagcccacactgggcccccggcgccacccgcttggaagaccagaccctggcacactgaggtccagggcacaggactggcttgagccctcagaagtgcaagcctgtttcacagacagaggccccgagagggtcactcccggggtctgctcagttccaggcacagaacagcaaacttctcgggaagcctagaccagacacaccgggggtgcagctagaaggggctcaggctctctgagttcagcctgaccacaagggtaggggacagtggggaaatggaggcctcgagagaccccagagccaggggctttgctgtggggcaggtcctcgaggctggcttctagccttcccagctctcggaagcctttcccggccccaatgcccggtcatcaggctttattccatttacaaataacttgacttaaaaaaaaattgctgaaacaataaatgcttgctatacaaaatgcaaacaaacagccctgaaagcgtacaatgtgcccacgtacccagagtgcaagcgactctccttcctcagggcccagtgaggctgggctgagtgcttgcccacgtctcccgcctgcaatgggtggcctgggatcccaccaggtgggtccgagcccagagccctggggaaacaggtttagacactttcctccgtgccacagtgaatgaggaaaaggtcccaggaggacacaaccaccaacaatttgcctccaaacttccagatttttctctttgctaatgcaaatatatctgtcgtttttcttaacataaacagagtcgtgcaacaggccccacgctgccttttgattctttttttctctgtgtgtgttggggggacagtgtgttttggacagttcacactgctgtcagaactggcagatcgacctttctatttcagtcaggcccaactcagaggggccccgggccaaggactggagccctgcccccatgaggaaggagggtcatggggctggtgctggggcagaggccctatctgtggagtgatggccccacgtggggacagggaggaggcaggcagtgcccaccagggtagagaggggctgataattggctggattatcccggcggggaggcctccttggggaagctatttttaactctgagagatgctgcagccacttccctccctctctttattgccctttattcctggggcctgcaggctttgcccgccttcctggaagctctgtccctttagaggcagggagggatgaaacgctcccctcacataccatagagtgtggtccccacatggttctggcagggttctcatgcgcccctttttagagaaggagagagagcttcagaaagcttgaggggcattttggaggacttgctggtctttttacgtctattgccttcccggcagccccttgaggctgttagaaatttcctaaattaacaaaggggtggttttggcttacaataaaaagcccatgggtggatctaaggggctcaaaagaccagcccagaaccttgtttctctcaatatctcagctttgctttctctgggtgggtctcatttcatgcaggctcaccctacctgggggcaaaggtgtccccggggcccctggccagccccaaagccctgggaaatacagctcctgctttcctgcagacccagcaaaagtcctagggctgattctcattggctggcttcaatcatgtgtccatctctgtaccattgctgtgatgctcacagccagacctgggtcgctcacccacccctgggccctgggggtgccccaggcccacaggaaacatatggtggagggtatggtataggagtagggagaccccaagaacaaggctctcagaagagcagcttggacatgggaggacttggaccagtgtccagcatgcctctaagtctctcagccagacagaaaccctgacacctaggtctgcccaggagatgccagatggagcatggctaaacgtcctggcctcaaccttggccctggtggctgccctcctggccacagttagtgcatcctcctcccagctgctcctcccgcagagggcggggccacgggagtgccggagcctgcacacgggaaataagtcaaccggtcagctccaggcccagctgatcaatgcctgcctcctgatggggcaggagggactcagtgtcctgtttccagggccgccaaccgttcctgaagttctgtgtgcctcagatcaatgctgcagggtcagccaggggcccaagggcacctgggcagggggaggggcgtgtgtgcatgcacgtgcgcgtgtgggtgtgactgtgtcctgggtctgggccatgtccccacaatgctcctgggggcagccacgtcctcttgggcaagtgcttctacccacctgggcgtcatttctccgtccatctgcctgtggcctgtggcgcaggttggcatttagcctggagcctaatgcatggcaagtgcgtggtgggcattggcccttgtcacttttgctgttgttagtatcatcaaagtgtctagtgacaaaaggtgtttagggaagagactgggctgagggcagggctgctagaactggtctctgctctgtggctcactgcctgagggacagagcctctttccaccttgtccagccagggtgtggatctggctcaggtggaaagcaaccccaccagaagagcatatcctggaaccgaccagcacaggtcctcctgctggccttatggtgggtgggggtgggaggccaggtgagacccagaccctggccgcctgcctggaggagggggcaaggcttgtgctgacagacagcctgtgattgcaggggccagcgcggctcggtgatggtgcaggtggagttgggagtggctgtgagagccaagctgcgcagagcagggtgagagaatccctcatggatgagacgttcctgagtcgggtctgtgagcactcgttttgcactcactgcatgccctcagcatgtgaggtcctgggctgcagacacgcctgaaggacatgcttctgccctcatggaggtgccatgctggtggggggaccacagtgagccagacacctcagagagtggccagctagggaagaaagcaagctgagcacagcaggtgcgtcctggtggtcggcaggcccctcacggatgtgccgtcacagctacccttgcacgtgaggcagttcagagagacagcgttcctgactgagggggaggcaggccccaaggtccagtgacagaatcaggctactggtgcccaagggcctgaatggccagtgtgttcagaaaagagtggctgagagggggagggtgtctggggcctcagggactttggctatcactcctagaaaggttaaactgggcatgctgagagctcattttacattttgatggtgggaagacgtgagggccaaagccgggccaaggtctagggtgggcaggggaagtctcagtgggctcttgggaggaggcatcttggaggggaggagatgctgggactctggggagcactggttgcagctgcctgcagggcgagcaaagccgctggggaagggccgtctggtttcacatctcactcggtgatggacttatgcctcccacaagcgcatcggcattgtggcatcaagatgtgattaccacaagagctggcagctgctgtcgagaggctgcagctctggggctcctacacacagggcagcgaaaccagccttcgggacacctgccctggacagctcagtggtcatcgtagcaaccttccctctctgggccttgctttcctcaaaacaaagccatgattccaaatgagccgaggagctcttctgtctcctgggcctgtggctccagggacactcagatatgcaaaggcgtcttgaacagccaacacgcccacccaaagctgggagagactgggctgcaaacaagcctcagtctcacccctgtcttggagaagctcccatcctggaggggaagaaagaatctgggatcaagggaaagccaggtgcagggcacaaaattcagggtgttgggaaggtgtgtgcgtggtgggacagctgactgctgttcatctccctggcttctcccatggctgtgccaggaaagttactactctcatggcctcggctgtcacgatcacccccattttacagagagggaagtggggccttagcaggggacgtgtcccaggtctcctgctgggcagcgttggtactgggctcagtccatttggcctcacccagccactctcgacactgccccctccacactgtaggggcaggatgtcctctgctcaggcttcacgcagcaccccgggagggccgtgagcccctctgcccacgtggggatccctggggcagatgtgtgagctgcttagggagagatctgcccacatccctgcctctttgtgtcccagcccctcctggagggaggctggtgcccagtggcgtggcagaggggatttgctttgaggggcccttaatggctgctcatgggttgcaattacaattaagaattgaactctgaccctgcacgtgggttgggagggtgggacgtggagcccaagggagtggcccagggagtcaggcttgcgtctctgctgggtgaccttgggcaagacgcttgccctctttgtgaaatgggtctgataatggctctgggagtggggatagggaggggcggagacctggcctgactcacagtagtcatcttgggtgtcgagcccctgggcaggggccctgtgtgtgtgtgtgtgggaaggggggggtggtgttccaggcgtgaggatgccctgggcacagccacttgtcccaggagctgtcagaatcttagacccagaggagccctgaggtgttcccgtccattcccttgcccctttctaggccaccagagtaaggcctcgagggagggatgtctcaggccccattcctcttgggacagctgagtggtctctgagggtgggagctggtttgaggcttcttccgcagctggcttgggcttccccatctgggaaatggagcaggggcaggtggggagctgagtcatttccctccttggtcactcggagggagaagaaggaagtttcctgagagcttttggtcccctgggaggctgtttctcccaggaggaggaggaaaccaggacacagtgtgccaggcagggcagggtgggggctgcagacttctgcgatgccccttctttctccactgcagccctaagttgaggacacacctgattctgcgtactggctccaccatctggtagttctgtaattaagcaagtgaccacccctctgtgcctcagttccttcatctgtaaaatggagccaatgagcttatccaccacagatggccgcagtggtaatgaaataattctagctgggtccatagcacagagctcagaacatattgagtgctccgcctggctgttttaccagccaagtcaagtgctaagcactttaggtagactcatctcatttaatccttgctacagccccatgagtgtagtgatttctactgacaacagggaaacagaggcactgagtggtgaagtgacctgtcccacagctagtcagttgaggtgggattcaaacccagggcagactgatgtcggtgagtgctgggctggatttcacccaccagctgcctggggccaggatcctagggctggtggggcctgcagatcactctgctctgagccgccagcaatctgggtgcgggccagagagccgtcctcctcggttagaatcctgcagccagtctccctgctgtgcagacacataattatatttcacattaaaggggaagctggaggccaagggggccaaggagccctttgaggctcatgctctgggcacagactggcctcctcggcccaattctgaggccctagggccgagctgggggtcagactggtgacaaaatggagttcccctgggtcagtgtccaggcgagcaggtctgtctgccaggatgaaagacttggcccctgcgggaggctcagagatatgaggcccagacaataggcctcagaaagctgggagggcagggcatttggggacaggttgggaagaaagcctgagcctccagagacaggggctcgaaagagaagggggtcacatggggatccggtcggcagagagaggtccagggaggagcacagagaaggcaggagatgggagaagccaagcagctcaagatggagaggagaaaaatgctattagggtgggatggtgtgtgtagagggtgcgtgcctggtgtgcaggggaaaagggctctgtgggaatgcacaagcttagacctgtgtgtgcgtatgcacacgtgcagatgccatcctgcatgtgcacatatgagcgagtgtgcacatgtgcccctgcgaacatcatgcatgtgggggcatgtatcctgcatgtttatgcctgtgtgtgtgctcgccatgcacctgtgcgtgcgcgcgtgtccccggcggacgtgcctgcatgtgtgtgtatgtgtgtgtgcgcgcatgtccccgggaagtcgtgcctgtgtgtgtgtgtgtgtgtgtgtgtgtgtgtgtgtatatatatatgtgtgtgtgcgcgcgcgcgtcccagtgcgcaagtggctggcggtgtgtgtgtagggggcggcccgggactaggaggggctcggggccaggccggagccgtggtaggctggtgcagcggctgcgcggcgcggcgcggcgcggggcgggcgtgctctccgcggagagttagaggagttgccgagctgagctccggtggagcgaggcgcggagctgggtgcgcgccgagcctctgcctcccgccgcctcctcgccctccattcctcgctccccgtcttctcccggccacaccgccactgctgccgcctccctgggaacagtagccgggggagggggactggcgcggtcagagcctgcgaggaggtgcggggcgccggggcgtaggggagcgcgccgggccctgcccgagatcagataacagccggcgggggagggggtgggccggccgtgctcacagccggaccgagggaccgacgccagccgccccggcccaagcgagcgcccagcggccgggggcgccgtccaggcgcgcgcccccgacccgtggctggaccagggcgatccgctttgcagagaagacgcgcccctcggcatggagcgcccccgggagctgccctgaggcggtggcggcagcggcggcgatgcagccagcgcggcagctgccggggccaggaacggccgcccggagcttggaggacgccgagcgcgccgcgcccgggccactgaccgaggtaagtgcgcggccgcgggcgcatggtccctcccgggcccggccccagttccccgcaggccgcgcctcgccactagcccggcccggagctagcacgaggttgtgcagcaacagggaaggtggagcgggagggtgttttcttcctctcgttttatttttttccctcccttggtgagacatcggaggaaatgctgactgcgagcttttcttttcctgccatgtctccggctaccaccacaaggaactttgctcctggctaaccttcgtcctggggggcgctccgggaaactttgaggagccctcggcccccctctgactggtttgcactagggggctcgggagggagcgtgcggaagcactctggcgcgcggcacgggtcctacgcgtgaccttcccggagaccccgcgatcgaggtggggttcggaggtgggcgcccgggctatatgagccgccccgagaatgcctcccgtcagagacctgcgggttcttggagtcgtgtctctttctcacctcccgtgctgtaatggagtaaaaatattctggaaatgattccatgccagcaagtcagccaagtccagaggctcccttttgcttttagaagtcggccttgatctccgaggggatggccgctggctgagaagctcccagggtttcagggccagggtccaccctgcgcgcgcacggcctctccgggtgccctgggggagcggggcgggaatcaggggctcatgggcagagacagctggggtggggcgctccttggggggttcagatgggagttgaggcccaagcgagtgtctgtgcctcggttttgatccagcgtgcccatgtcatgtgaatattttaaaacctgtgatcagaatgggggtcaaagtgtttctttggggacggtcttgttctgggaggttttcctgcctcctcacagcctggactcgcccgcacctgggacctccccctccccatttcccagggggcgttcccatcttagagtaccgcgctgcctgtggccatttctagtttcttttttgctcccctatacccaggttcgagccctgcaataaagcgctggggacctcctggctcccacatctgcgccccaaacccaggttcacaggctccgtctccgagagcgccgaggcgcccacacgccactgaaatcggcagccgcctttggaaggtgcgaacccggaaggcgttagccttgggcctagccttcgccccctctgagatgccaaaggagagccggtccctggccgcgcggctggaccccagcctccctcgcgctgcgctgcacctccgcggcccctcctcgcgcagctccgccctggaccgccgccctgtggcgggcgagggtcagagaggggaggtccatctcagccctgggcgccaccagaggctttcgctctttttgaggggtactcccttctgtattctgagaagagcccctcagtgtctgctgggaccgccccccccaacaaaagacttcacagcgaagtctgcccctcagttctctggtggcacctccaaccagacaggggacccgaggttggcagctctaggagggggaccctgggggcctgccatttggtggggccaagccgcctgagagagagcagggagtgagggcggagggcactcactcgagcaccctggagacgaggagggtggctccagtgtgctgggccacagggacacccctcttctccactggagggccgctgtaggcatacagtaggcagtctgtaaatgctggctgttgacccagagctggcaggtaggggctccaagtcctctatcacctcctttttcccctcccaggggagggcatggctgacacccctcatccccagcactgaagggggtggagccttctctgggaggggcaggacctgagctgtcagtccatctctggacactccccctgcagctaccccgtcaaaaccccataaggtttccaggctgccccggaggggacccctccaggaatgtgcctcaactgtgctggaaggaagaggtgcctgggaagtggtggaggggtattgcctaaaaccatgcagtgggttgggtttggacagatgccttcacctagctctttccaggccaggcgcttaccccaccagccttcctgccccagggccatggtgtccccatccctgggtctccttgaagcaggacaaagtaacactgagtggccctgcaacagcaaaataataatgacagcagtgataacaggagtaacagcagcagcagcacctgcagctctgcagcactggggccggttctgcctatgggcagttttctctgcctagccaggcctccggtaccctgggccacagttggcagtaccaagcgtggcacccggaggccttggcatatggctggggcggaagtgagtgcatcattactgtcatcaacctctgtggccctcgccaggtccccaggcagaaggctactggtacacacggtgcccacccagtggccaccctcaccccccctgctcccaggcccagctctgggctgggcccttcctccaacaggtgcagctggtgcctgtggctgggccctggccagggctttactgtgagcgacacatgggtacacctgcccctccccgggcctgcccttggagccctgccaccggctagcgtggaggagagtcagggagggggcagcttgcgggcagcaggaggggtggaggcttggctggccacatggaaggtgcggtgggtgggggctcagccccacgggatggctgtgccgggaactggcagcgtgatggggacacggcagcagggaaaggctgaagatgaaagagagctggcctgaaactgggccgtgtgcaggttggccagagcttcagaggcaccatggggttgggggtgggggggggcctggcagaggcaggtgggttttctgaggtgctgggctcggggcaggaccagagcccccgctgggcactggccaaggacccagccctgggtcagctgacttaatttcctaatggcctgccagtgcagagggtggcattagctctattgtgcagacagggattggaggcccagggaggcactggaggcaccagcctgtggggctcagacccagagccctggtgctttcccagggacagaactgcaccttcccccattccacagacacacccctcaggggcatttgactgccaggctagctttctccctgccttaccaccaggcaggtcccacacagggcctgaggcctgcatgccatcccagctcccgggagctgtattcctaggacctagttaagccctggcacagagtaggtgcccagtaaatgctcgatgattccatgtctggactgcttcttccagccacagaggccttgctgtgctggtgagagctgtgggggctgagttctggggctggagaccccaggccctgttgcctagctgtggcccctgtgctgggtagccatacagaagtgcttaatcaatgggcattgcatacggggagacccagcccctgccctcagggatctcactatctcagaggagactcttggacagactcaggggggcaagagaggcagatgttgccaccaagatggggtcactcttcctggcctcagttcatcatctgtgaagtgggactggctccggagagtgctcaggatggggcagtaggaatgtgagacttggagcgtgcctctgggagttgggggtggggaggggctggtctcagtagaaatggacgtgtggagagggggatctgggaaggagggggtgtgagcatttgtggagccagagcctggggaactcgtcatttccccatccaaccttcccttggacatgtagggaagcaggcccagggcagggcagcgagttgctgtagcagtgggccccagatggcagtgggccccagatggcagtgggccccagatggcagtgggccccagatggcagtgggccccagtgcaggcctcctgtttcctggtgtgtcctcagtgtcccctaaccccaatcaccaccactggtgctccacagctcactccttcctgcctggctgctgaagtggcagcatgaggctgtggagaccttggggacccccgcccagccctctaattagccttcagccatgcatcattggacatggttccatttgcttggccagataggagtgggaacccctttctcagctgccccagggagcagttccgccttggctgtgcattaatgctgtcctagggtcagtgggcacagcctcctggatcctgcctgactccccctgcccacctggactgagccctccctcctgcttgggcagccaaagcctccctctcctgccctcacctgcagcccaggcctctttgaaggactcaggcttggagaggggccagggaacaaacaataaagcttatggagtggaggcttctaccagagccactctgggccattgttccttgagcactttctatgtgcctggtgcactctgggtgtcagggccctctgtcgattcccaccacactcctccctgggaccctcagggccctgcacagtctggcctcacttccaggactcttgctccctccccggggccacgctcctgcttgccttgctgtgcttccaacagatcaggcccactcctacctcagggcctttgcacatgctgctatctctgcctggaatgttctttcccagatctctgcacggcccctcccttaccgctttcatgtcttgcccagatgccaccctctctccaggacctcccctgattcccctgtgggacactgcagcctccctttcccccatgttccttttcctgctttatttttctctgtagaacttaatgctatctgccacaatatattttatttgctgatcttgtttactgtctatctttcccttggaataggatctcctctttttggacctattctaccacagctgtgtccccagtgcctaagcggtaggcaggagatggcaggcgcccagtaaacacagagagtgaatgggctgcttcagccaggcctggtgcctgacatgcagtgagtgcttggtagcaatggtagccagcattgtcagcccattctgcagatgagaaaactgagcctcagagaggtcactgtccaagaactgtggcgcttgttggtggacagagctggattctgaccttttctctgagcctttggcctgccatctgtctgtctggctgagtgggagggagttggggcttccttcaggcccctactctgggtggagtgctttatatctgtaccctcactgcttcaagctccaagccctgttgtgtcctctagcacttggcctgcttcagctcaggatgtccccatctgattccttctgaggatcacaagccgttcccattgcagatcccagcaaactgaggcctggggcgtggggcctctcatatctcagctgatggctgaatcctttctcctgccttcagcatacatgtttggagggcggctgaggggatggggctggcagggaggggacagtgtctctgtttcttgcccagttaagcattccagactccccacggtcattgagtttcatgtcaatgcatttcacctctcctttccagtcttttttttggaacatgacacccacgttataaaatgtttaaaaatgtttatgatttgcaatgatcaactccagcggctttagtggccagcagtgatcacctctgcaactatagagactggcatgctttctgcttgcctgagcactgcccgtccctcctcccctggatgtccatgttgcctcagaaaagacagggctggtggccccttttgtggggagcagataggttctggtcctgggcctcagccaggtgtgcccggttggccaggtgtgcagccaggtgtgccaggatgggagattgtctcctggggctcacctggggagtgggggcagaaaaggaaaccaggtaacatgaggactggcagcagggatacttctcagccctccctgcctccaccccaagggtgtacaggagggtgcgacgtgacacctccactgtgggagcgggcagcctgaggccagagagggtccccacagccggaggtcacacagttcccggaggaaggctggggcgcagccttgaggccacagaccctctgtccctgatgcttccaggcagcttttggggacttggcaggggaggggccggggagaagggagcatgtggagactgagatgtgtatgatagagaggatgaaaggccgggggcaggagaggtcaagggggatggagtggcctggtggccggaggtgtgcccttgcccctgcccgccccgcttgctccagctgcagccgggcccgagctggcggctccaggcctgcaattctccagcacttaaagcaaaaataaatcgctgccagcagctggcgttctgtgtggcagcagccgagccaaccccgccccgaccctctgcctcggggctcctggttccgggccaagccaggcttccattcagggctggggggcgccgaggccagagagggtccaggggagcttggcgtggccggagggggcgggtcctggcatgatcacagggagggcagaggcagatggagacctggggcttccaggggtgctgggatctggggcaggttggggatgctcaaaagtggggcttctgacagtcttgggtcttgtggaaatagggcctgggaggggcaaactcaggggtcacagccacctgtttggccctggggatccccaatcacaagccacccccagcctgtcccctggatgtccctttctttccatcccctcctttcccttctcagagaatcctagaggtcctagaggtcaggtatttgcgtggtgagctttgaggatgcaggattttggcctcattcctgagctcagcaggtggctggggatgtggcctgcacaagacccctgccctggggggctgacatctcagtgggtggggcaggatgaaatagacaaaaaacacatgagccatcacgggcattgtcatattttgttgaatataacagtttttaattataagagtgttatgtgctcacagtaaagtgataaacagttgtaaggggaaaagtgaatttctcctcctcaccccctgcctcccccacccccagagtttcttgtccttggggtgaccatcattagagaggcttctgggtttctcagtgcttatgcagacgtgaataagtaaatggaggcatagaaacgtgctaatatctaagttgcctttttttaaattcgtatgggaccattgcatacatgtcatggcgtcccctgcactatgcgcactgctgtgtggtgcccgtgcccactggacccagggggtctcatcctgtcgtcctgggcatggattgagggctgagtcttgggactgtaggatctttgtggcatctgaatgcacagagccaccgaagtccgtgagtcatgggttcttttcgttgtcattttagctgcgttgagacagagatcctggattgcaggatttggtttaagtaccaggagaggtaccgagtcctcgcctgggtgcctccttcgtcacatccctctgggagttgggataatccagatcccctgcctccatccccagagctcagagggtctggggggcttcagagtcgcagcctggggctttgggacctctgggtgaacctggctcccactcagggcagagtagacacgctggagctcggaggggaggcgctcattgctgctcccactggggtccttcttcctttagcctctcttcttcccttagccctgacctcctagaaacaggatcacttgttccctcactgtcttcaggctggggcaggcctctgtgtggggaatgtcactttgtttttttttttgttgttgtttgtttgtttttttttttttttgttttgagacggagtctcactctgtcgcccaggctggagtgcaatggcgcgatctcagctcactgcaatctccgcctcccgggttcacgccattctcctgcctcagcctcccgagtagctgggactataggcacccaccaccgcgcccggctaatttttttttgtatttttagtagagacggggtttcaccgtgttagccaggatggtctcgatctcctgacctcgtgatccgcccgcctcagcctcccaaagtgctgggattacaggcgtgagccaccgtgcccgacccaggaatgtcactttgacctgtctccaagcttccgcatctcagtgcctgtcccatccttgtcattccttggaacctggcctgagatgcatcagggtggtcccaccttactccaccagggccccttattagaaaggatctgctacactgattgggagagtgactagtctgtggtcactctcagtatctgtctcagtgtctgtggggatcagatatacctggtgcccttcttttatgagcctcactttccatgtttgtgaaatggggaggcagtccattctcgtgtctgggcatctgttctctccttccctctgggcttgggcactgcaggcaagacagggcagcttcctggcctccttgatccctattctgctgtgtggccggaggctcggccctgccatcaccccggcctgctgggctgcaagctgtcagcagcacctgcccagtcagagcggccaggtccctccccaggccctgggagccttgaagaccactggaggcagtgccccaggaggtagccgtggagtggccccggccctccctgggggttgtgtaacagaggagaccccgctgccctcctcttttcctctgcagggtggaggctggcctgggccctgccagcacagcctccaggccactcatgggtcctggcctccatcccacggtagatgccctgactctgcagcaccagggctcatgaccaggctcttggtggccttaggaccagctgccgctgggtggggatgccccagatcaaaggcaggtaatagagaggagactgggaggacagtgggtggggagcaggaaccctgggagcctcagtgtcctcccctgtgaaatgggaacactagagaaagtgggttgggcaaacccacacgcctaccattgcatctggggtgtggaaggagcactggggcaggagtctggcagcaccaccaaccaggtccagtaaagaaagccgaggcagggatcagagggcggcaagccagtgagaccctgtgttggtttcctgctgctgccaccataacagactgggtggcctaaaacagtacaaatgcagcatccgttctggaggccagacgtctgaaaccggtgtctgcagggctggttcctcgcggagcctctgagggagaagccattctggggctttcccccaacttctggggcttctggcggtcctggcattccttggcttgtgggcatctccagtctctgcctcttgtcttcacatggtctcctctccctgtgctgcctctccctctcctctctctcactctttctgttatgagacagtctcactctgtcaaccatggctcactgcaacctggaactcacaggctcaagtgatcctcctgccttaatctcccaagtagctgggactacagatgtgcaccactatgcctggcaaatttttaattttattgtatttattttttttaactatatgtttttttgatatggagtctcgctctgtcaccaggctggagtgcagtggcgtgatctcggctcactgcaacctccacctgccaggttcaagagattctcctgcctcagtctcctgagttgctaggactacaggcatgcgccaccacgcccagctaatatttatatttttagtagagatggggtttcaccatgctggccaggatagtctcgatctcttgaccttgtgatccgtctaccttggcctcccaaagtgctaggattacaggtgtgaatcaccgcgccaggacctctacttctaaggatgcttgtcattggattcagggcccaccctaatacaggatgatctcatatccaaactctatatttgcaaaggctcttttcatctgaataaagtcatattcacaggttctgtgtggacatctctttggggagggcaccattcagccactactcatggccaacccagatatgccaccctgcatcctttttctcttttaagaaacgtgctctccctgtagtcccagctactcaggaggctgaggcaggagaatggcgtgaacccggggggcggagcctgcagtgagcggagatcgcgccactgcattccagcctgggtgacagagcgagactccgtctcaaaaacaaaaacaaaaacaaaaacaagaaacgtgctctccattttgggaggccgaggtgggcagatcacgaggtcaggagatcgagaccatcctggctaacacggtgaaaccccatctctactgaaaatacaaaaaattagccgggcgtggtggcaggcgcctgtagtcccagctactcgggaggctgaggcaggagaatggcgtgaacctgggaggcggagcttgcagtgagccgagatcgcgccatagcactccagcctggcgacagagcgagactctatctcaaaaaaaaaaaaaaaaaaaaaaaaagaaacgttctcttttttagaaccatactttggagacatcgagcgctggggtgaggtgttttggcatcagctaccagcagtgcatcctcgggtgggtttcccagctgccctgtgtctcagtttcctcacctgggaagtggagctatgaatggtccttcccctgtcggagggtgtgggagatgacaccttttattattatgtctgtcagcaactggtgtgaacatctaactggtatttcccacaggaggctgtatttctgtttagttaactggcctcactgaagcgctcacttttaggtttccctccaaccctcagctgtcagtgatgtaatgctgctgtaattcctggacacggaggtcctcctgccccacctgtccaagagaaagttctggaaatggcctgtttgcttgaggggctgtgtctttgtggttttgaggtgtcactgctgtgccccccgagggtcgtgctggttggtagcccccttgacagagtctgtgtgcactgggtcccttccttccactcctcccccactgctgaggccaccagttctggccgtgaagatggcagccccgctgtcatcgttctgcttggcgtctcctttgttttagaggtgtagtggcttttcaagttaaaacctcttgttgtagttccatttctggcagctgccggctcctgcagggagggtgttttcctgaccttatccttcccggcagagaagccctcagggagtgggtgggatgccctggccacatgccagccctctgtcatcctcctgggtctctatggctcacccagggatggggagcagcggcctcgcttcagacgcctgagcggggcgttgggaggacctgccataccccatcccgtgccagcgttcttgcctgcgcgtggagcccgagagtgtggctcctcactgcccagagggaggggttgggctcatacctgtgacccccttgccacaccctagtccctctggaggtgggtgtaggtgggattgctataatgccccttggccaagggagcttgggtgtccttggccccctcctgtggctcccaactgccgccaggaaatttgggatccccagcaatacaaatggcccggtggtgaatccagcagcctgtggtgtcaccgggtgcctttatttctcaggaagtagtgtgacgtcgtgctgaggcttggcaccccaaaacaataatgaaaacgactgcttacccagcggcggctggtgccaggcgctgtgctcagtgctttcccgaacattatctcactgaattctcaaaatgtcccagccaggcaaggagtggggcttgagagatggggccactgggggaggcggtggccaagccagatttgaaccccaatcgggaagcctcggttctctaaagaaggccccgctgggccccccccgagggaaggtagagacatcctgggcctgggatccaggaggcgttttgccactgagatgtctctggcttggaatggcagcgctgggcatgaacttggggcctggattgacacgggctgctctcccacccccatctgctgtgtgacttgaggtaagctgcatcacctctctgaacctcatttccctactgtgagaaatggagccaaatttaccccatttaaactgcagttgtgcggggagcttgcctggccaggtgttaggctgtttcagaattccagaggacggggtctgagtcctgctattcacaggtggagaaatggaggccgggagaaggggagggactgcccagagtcttgcctcccacctgtgacctcagccacagagcatggctggtccaggcacctctttcttgcccctagaccaagctaagaggacaagccattgcctgagcactgtcgtgtgctgggggcatgggcagggagagaccctgctctcagggtgaggcctgccccttcacccgttccctagaggtgaaatggcctctctccatgtgtaccacatcccggagccctggccccctggctgagctcaggcttcccacgaatctgtgggccctgtgtgataccgcagtttgtggtggcggcagcttcgctgcttggggagtaagtcaatgacttacttacccactcactcattcacttaactttggggatccccagtcctgagggggaagcagctgtgccctcagagccccatggctgagtggaggtctctgcagagggtgggggtgtggtggggcagggacggtttcctggggaagaggccctggatcctggccccacgtgggggttgggggctgctgtggcacctgtgtcccccagcaccagtgttcagctcaggggagctcttacagagcctttcaaaaccatccctgggccccaggcagggaggtccccagccacctgcttcctagccctccctgtgacatgcagggagcaagacttaaagggcatgaaccctgagtccagctgtggccttgctgctcagggctgcccatcagccttgccctgcctctcactgcacgtcctgcttctgagctggggtgctggtcccagaccctcctcctcctgcctcattccagaaccttctctctctttctcgggcccagctcccaggcccccactcctgccccattcttggctttctccctcaagggtccctgactccccaccagcagggtaaccacctctttcactgagaaaatcgaagagaatttcaactcctgcccctcacagcttccctccccatgatggactgtcacccctcacccacagggcccacccctcttgcccacccaaggctatcgctgtctcaaggctccctccctccgctggaccctgcactacaccctggttgggagtgaatccttccaaaggtggcgatggagggcccactgggatgggcactgctccccaggccccaggacgctccaaggcacaaaacaaagtcctgccccacggagcttctgtgccagtggaccactgaccatagactccatgggagagggactcgcttctggagaaggggcccagacctgcgtggagtcagggcaggagctgggaggatgtccaagggaagcggggccggtggccagaggtggacggagcctgaccaaggggcgggggcacagggatggggagggggagcaattgcagggtctggaggctgcagcagcatttctggttttctttctttccttccctcctttcttgtaacaataagcatttcttccagctccctggtccagagtttggttgtggctctgagctgctgggaggagttggggttggatctgtcaggctgtggttggtttcaaatctcctttgtgtgtctcctcccaatgtttttttcttggaggtgaaatacagttcttttttcttgaaggtgaaattcacataagatgaaattaaccatttaaaagtgaacaattcagtggtatttagtgcattcacactgtcgtgcagccatcacctctgtctagttccaaagccttccaccatgcagaaaggaagccctgtcccattggtagtcactgccagtccctgcaccatcccctggcagccactaaaccgcttgctgtagctgtggatcttcctaatctggatgtcgtgtgtgcgtggggccctgcacgggtagccttctgtggctggcttccccatctccatcatgtcctccaggctcggccctggtgtgctgtgcatcagcaccgccttccttgccagggctgagggatgcctgggtatggatggacacactctgcctgcccgtttgtcatggctgctcagcctttggcacctgtgaacggtgctgccgtggacatggaacacaggttcccttggatgccggtttccagatctctccatgtacctagaggtgaaatggctgggcctgcggcagccccgccaaactctggaggggctgttacctttggaagaggctctgactccagggcacccttcctgtacccctccagcctgcgttcttgctgtacccccggaccacagacctcctcacaagactgtcctgctgctccccagcttctcctcatggccatcccctgtgatgctttggaaacgtttaggacagggttaccagtcacctggtttgtctgaacctgtgctctctgggaacaactgccttgcggcgctccgcccagccctcttcctcctcctcctcctccacttcttctttggagggcaggcatcttcccctgcacactcgctcccctgcacatctggcctcctgcagccccaggttcatgtctagcccaggcctttcttccccggtctgcccaggtgacatctcccttggggtctgtgggcacctggatcctacatggtcagaactgggctcccatctacctcgagcctgtggtccccccaccccagtctcctcgtcactagaagggggacaggctgaggacctcccctgccaccaggcctaccttggccagtgggtgggagggccaagtgtggggtcatgtctggcaaggtggtctcccagctgtggggcgttgcatggctccaggctacaggctggggctcctcatctgaaagtggctacaggaatccgtcttgcctcctagggctgtggttgaggtagaaccggctgacttatgctgagtgtggtggtggggactttgggctcctggacaacttccttccctctctcctgagctgcagtgacttcgagggaggtggtcacataggcagagccttcctgagccttcgtgtccccaggtgtgagtgggaataagaagctgccctaccctctgcacacagcaccactggaccactggaccactggacctaccggaggtgctgtgtgaagggcttccagaggtccaggcacatagtaggcgctcagtgtgtgctcacttgtgggtcatggaagctggctgtgtttgctcagagaacccagttcagtgggctgggccccgagggaaggacgagtctggccaccgcagcaaggagcaaaggcagacaaggacacgccccccaacaggggccctctgcctctggccccatgaggctgcagctgctcaaggcagggggcaggggcccagctggtccccactacttaatcatcttgttggcacttaggaccagcaggagccccaccagggctgcacccggcactggccttggaggggctccaagccacctggctcccttggcctgggagtgttggttctgtagtggggggatttcatggacccccatcctcctcgagtgggttcagagaatgaggcctgagactggctgtgtagatgggttgtctaaatggcagacatttgtggtccatgatggtggccacagcatttgggcagtatagacagggaggtggatggtggagacaggtggaaggcctgaaggtgggtgtgggcagcacggtcggggcaaccttgatggtgtgcctgcaggcataggccatatagctgtgtctgaatttcataggcagggcaggtggggtgtgtgtggagatgcacagatggtgagggttagggaggctagggcaggaagatgtggatagtgtccctgggtctgggaacaggatgggcccctaacttctgccccttctttccgagtcccctactctctggggaggggccgaggctgttcccaggccagcgctggaattttaagtccatgtgcctccctgcacggccgtaccggctctcccttgccctcccctgccctcccctactggaaaggacgtttgtcagaagcttgtgctgcttaggagttttgggtgctgcctcatcgctttctgtgcttgtccccattttacagatggggacgctgaggctcagaggtggagggaattttctgggacccatggtgcttttttgagccacagtagaggggtctggctctggcggatggggcagccctcagaggccctgcttcaggccctcaaacagtctgagtttgtccctgaggctggttgcaccctggggctgacctgcacaccctgccccactgctagagcctctacagcccctggcttctgcgtgcgccctcccctctgcctctggtatgtctccactcttgcttacgaagccagcactgcctgctggccatttatccagctaaccctgtaatgcccctctgggagcctcagacccccccgtgcgggttgagctgccagcagatggtggaggccggagggcagcacacctggcaggccctgagtcctggggctccacctcatggttccacagttgctgagcatctgttccatgccaggcgctggaattgtctcacttagtcccctcatggcccgctttacagatgaaaccacaggggcctggaaggcaccattcaatcccatgtgtttgacaccagccccgtgcccccaggccttcaccgcccgcctccaccctgagcagtagggcaaacacctggccagtggcctgaggctgagtgcatcctcccagggccactcatttgagcccatggagtgtgtggcctgtctaagtttggggccaagggtgccactgagggcactgctggtctctagtgctggcctcttatgccccacccataggacccaggcaaaggaggacaggttggagtaataaggggtttggtctaggctgtggtctacctgaagtctccagtgaaggctacctcccttggcctcagtgtactcatctgtaaaattataatatctatctcgtggggatctcgtcacgtgtcaatgacatttcagtcagtgatggagggtgtgtatgagagtgatcccataagatcatcaaggggctgccctatacaggtgtaccactttttatcttttatactgtatttttgctgtactttttcaatgtttaactatgtatagatacacaaatgcttaccattgtgtttcagctgcctacagtgttcagtacagtacttgctgtacaggtttgctgcctaggagcaacaggctccatcacacaacctgggtgtgcagtaggctgtaccatctagctttgtgtaagtctctctatgatgtttgctcagtgatgaaactgcctgatgacacatttctcagcatgtattccatcgttaatcgaggcatgactgtatggtactcaggggctaagtctgacacatagtaagtgctcaataaacctaagctctcattatagattactgttgctgtcctggaaacagacacagggcccctgctctgtgcctgccctgtgctgggtgatgcactgattctggagaggaattaggactggaggctcaactcgaggctgagggtggggaaggtgaagacagagactgcctggtgtggtcagggctgtggcagagagaaaccctggcataggcaccctgggaggggaccggcctggcgtaaggcgttggaggtgggagctgctgggagttcagtgttgccaggggtaaaccattagaaattgttcatcttagttccagaaattctttccaggccctgctggggccacagcaaacgggtccctggaagtgctgagggacccctgagggtggcaggcctggacacagaccatgaccacatgggatccatgggctgcttccttctttaacccagtgcctagcacagaagtgttgatgatgcctgggcaaggtggctcacacctgtaatcccagcactttgggaggctgaggcaggaggattacttgaggccggaagttcaagaccagccggggcaatatagtgagacccatctctacaaaaatgaaacattagctgggtttgctggagcatgcctgtagtcctagctacccgggaggctgaggagggaggatcacctgagcccaggagttcaaggctacagtgagctctgatcaagccactgcactccagcctaggcgacacagcaagatcctaaagaaaaaaaaaaaaaaaaaaaaacggcgcacagtgactcatgcctgtaatcccagcattttgggaggccaaagcaggtggatcactcgaggccaggagttcgagagcaacctggctgacatggcaaaacctcgtctctactaaaaatacaaaaattagccgggcatagtgaaacccacctctgggaggctgaggcaggagagttgcttgcacccgggatgcggacgttgcagtgagccgagatcgcaccactacactccagagcgagacttcttctcaaaaaaaaaaaaaaaaaaaaaaaaaagaaagaaaaaagaaaaaaaggaaataatggacgtgatgataacagggatagtgatataatatttctctatgccaagcatggctctaagctctttatgaagtcattaatcctcatgacaatcacatcatattgcccccatgttacagatagggaaactgatgccagagaggtgaaatgacctgcccaaggtcttaccacgactgagtggcagaggtcaggtagaggttgtgcactggcctggggagaggggaagagtatttggggttcagctgaggcagaggagtggctggagcccctctacttggtgggcagggccatttccagagcatgtcctgctgtgccctgcctgccctgctgtgtggctcaggcatggcctgccctctctgggctctgagcctctgcagccagcccaggatgtcctcgggcttctcggctgggccacagccctgctgtacctgggtccctgccaggcttgttatggtggctgccctgggcccccgggcgcaggcaggggccaggggtcattccaaggtgccagctgccctggccttggggttggcatgggggtgaggggctggctgggctctcgagaacttgctgaggctagagctgagtgctacatgcacctggactccttgcttttcctacaaccttgagaaatcctcagctaacaggcagggaaactgaggctcagagaagggcagccgggaatctgagatgacacagccaggaagtcaccgagccagctcgccgcaaagccctgcttcccactttgcagacgacgttgatgaccaccacagcttctacttgcctggtgctttgctgtgcacaggtcctgccaggcagcaagccctggcatgcccatcccagtcctccaaggggctgtcagtgcccatctgacaaatgaggacaccgaggctcagagagacatccccgtgcctggccggggttctagccagcttggttcgcaccggtctcaggagccagtggttatgggatgcccggtgtgggtatcagccccgtgttgatggggagggccgtcttggttggggtgaggggcccctcctctgtgaggatgacgacaagaggatgtgattcaagggctcttcacagtggtcactgtcctaaccactggacccctggagtcaccagagccggccaagctgggcctccacccagcatccaggggtggggctaaggcatcaggtttggggcccaccgtggctatggcctcaggtagccgtggggacggactgtgcagagcctcccagggaggcttcctggatgcacgcaggtgtttgggaggctctggccgggggtcatcgttcaagggggtctcccagggcacagattggagcacactgtccatcaaggtcatctgcctggcctccattcctagctgtgtgaccctgggcaagtgtgtttagctctctgggcctcagtttcctcatatgtgaaacagagatcctcatagggatgcttggggactgaatttgggagggcagatgcttggcagtaaaggcatgggcttgttccccagctctgcctcttataggctgtttggccttgggtaagaaacttcatttctctggagcttagtttcctcatccgtccaatggggataatagcagactcttccctgcagagctttctcagggcgcagtgaggcagtcaaggtaacatccctgtagctgcgatcacagctcctgctgcaggctctcgagcaagggccaccccaaagaacgcaggaggcctcagcttctcttgcctgagatcgctgccgtgtggggcttcagcgcccggctgcctgtggggagcggatcaccggcggtttcatccccgtgcactcttgtctgatgaaatataaatagcacgcgatgttttcgagcaaggctagggaagcgtctgtgggtcgtcctcccgcccggcagaggctgatgagctggcctggggacgggaaggagatgggagctcctgaataaatcatcgtgggagctgggctaatgcactggccacgggcagcgtgtgcaattagtgtgttaattgtccagagaggatgactttgtgagggtgtggcccagagtccactggtttgcagagtgcctgatgtctgggatgcctgcccccacgactctgggaaaggaccccaagccggagaatcagccagtgcggcctgactcagggcctcatactctgccctgcggcctccagctcccctggcagccctcagctggggctgacagcgcacagcagggattagcaagtggaccaggagcagagcctgggggccgagacttgccccctctcacccctcccttctccttttcttctttcagcctctttgtgctcagtggtttggttttgttttttgcctttgaaccaaggctgtcccagacttagcttctcttgccccgttgccaaggtgaccagaccatccctgccaccctgcagccactgccagggctgggtgagggacatagccctggacgtgtgtgtatgtgtgtgtgtgtgtgtgtgtgtgtgtgtccatgcctgtgtacatatgtgtacaagagcagacacacagagatccccaggtcgatagccccacacaaatgtgggcatggattcatcgtttgaggaagaacgcaggcccgagtctgtgtgcatgctggaggcacacgcaggtggactgcacacacccatgtgtgcccatgcaggagctccctggtcataccccacacttctctggtacccgaggccctgcccagtgcctcctctggccactggagccttctgcatgtgcagccgagggaatgaatgcgtcctcccctgcctggcagcccccgtggccagcagcatcccgaggccaggccagacctctacggcccccactgcccacagcatgctgggccatccctccaatgggcttccttgctggggataactctgaggcgtgttctatgcccaggaggctggagcccaggtatcctcagcggtgacctgctcatctatgcagtcatttttggctgccgtcctgtccccatctcatgtccccactcccttcctggtgcttcccgctgtcacctgcaaagtaaactccctactcccaaatccttgactcaagatctgtttctggggaaaggactagaatagaacacacccttatcctaggtcgtgtatcggtgtacacatgtgacatgttgccagcaaagatgcgtttacagagctgtggtgtgagagcaggcatgtgctagcatgtatcatgtgtgtggtgtgcatagcacatagcactgtatgctggacctgttctgggtactgtgcatagactaacatctgctggaccagggaggcagaatgattaggcccattccacagatgtggaaactgaggcaaggatgaatccataaatgtgtgccttaggggtggagccctggcaggagctgggacccaccctaggaggtgagaatttgtgcaccccctcagcattgctgcactacccaccccaagccctgcagatgctggcaggaggctggaggtggaagcggctgcattcatcttcagaccccatggagcgaagctgccgtcccccatgcctgcttctggccttgcaccccagcgactgtgtgcatgcgcccttcccaggatgcctggcccccagatgctggccgatcatgtggcctttgggctctggattccctctctgagcttatttcttcgtcttggggcaaggatagtccccagcgtgtctcctggggttgtcaagagatgcacaaaataggtcctttcttcctgctccaggcatgagaaagcatttcctggccatctcagtggccacccacctgctttctgagcagacattgctggtcacacctctgctctgggacaaatgtcctgctagatcccagctcagagaaagaccatagctccaggtcagtacagcacagcaggggccaaacaggggccagacaccagggccctaccccaccactcctgggtcccatagcccctgcctcctcacagcaccaattagctgccaccaaaggaatgggagagaggcaggcaagagccacatagtcagggaaggcttcctggaggaggtggtccaagccagacttggagtgactgtggtgtctcctagagacaccagggccaacgtgcgtggtcaaatcctaggtctctatttccacagccctggaagtcctgaatttctatcccagctttgccatggactggctgcgtgtccctaggcacagcactcatcctatccgagccccagtttcttgcctctatcaaaagaaactggtgtgaatggaagtggcatgtgtcacagtgacgagtgttcctgacgcacagcagttgcgcagtcccagtttactggggttggaaagcgtgtgtggcagtaagaggtccgtgcaaagcggtatggggtcagaacagcctctgtggggccccgctcgctaccgtctagctgtggggtgcctgagtctcctcactgtgaaatcaggccatgcagagccacctgctacctagtactagagggagtgcaggaaaaagtgcagccagtgcttccagacccttccctgtggcctgaagggctccccaccccacctgggtgggctgcacatgcaaaggccacctgggggtggggagcaagctcctggcctctgagcggcctgccccaccctgtccccttcagagctcatttccctgcccctccctcctgtctcctcacaccctgccttgtgtcctgggctggggactctgctcttgtttccagccctgttgaccctcagctggcctcgactccctcctcccgggtggtcacacagtccctcctgtagccggaatctcctgtgtttctccggtttctcctggaatgtctgtctcccccgatctgtgaggagccgggcacagggctgaccacccttttcatgctacaccccgcacagagcctcaaacgggtttggtgctcaggaaagacttgtttatggaatgaacggggaatgaacaagtggctggatgggtgggcgaggggccaggctgccctgtcctttcccgacaaggccctggccctgagctggcaggtgctcagcccttctccctctgatccagcgtgctgagctgttcgtgtgctagggatgcctttgacatcctccttctcagaataacacttttgagtgcaagagagaacccatatagggccacagaggaaaccagaaataagtgttgcagtacttatcaaaacattcttttaaaatgtgtgatctagtaattagcatgctgttgcttatgagcgccctaactagcaagacccggtggcagccgtcctactgactccatgggagcagggaggagagctgtgcagctccagcggtctgcattgctatagggcctggggtgagcccaggctcggtgtgtccagcatacatttcacagagaggttgaaggcggggaagttgatgatttttcccccatcaagttcacaaagccctggcttctgtccttgggctctgcggcaggacctccgggaacctgctccactgtctcggggactgcaaagcctgcccctgctttgcccggcccccttgccttgcccccagggtccttgggcagccctcctgggggtctggggaccaaggaagggcatcccgactgtgacctgagctttagtttcccagccatggtaggggagaagtggtcggggttggctgcatccccaggccctcacacctggctgttgtgtgtgaaatgcccaggccaggcattgtgagtccccaagcaaggccatagagcagagaggatttcccatcacccccaggctcggctggaaccctcctgctggcctggcagaaagctgacatttcctgccctgtgggccgagctcagagctcagcaggggtcagagagtgacagccatgctttcttcctgcaggggccaccctgctgtgagcagttcataagggaggaaggtggagacgccctgttcccaagctatggggcctctcatttgacaaatggggaaactgaggcccagaggggacagggaaggggtggtcccatggtgagctgaagctggagtggccttgggtgggctgcagtgctgcctgccgtcttgtgattcagactttaaggactctagagcactcttggggcacagggacagaatcctagttcccaatcccttaacttcccccagggacctggttctgtgctgaggcccctcaacgcagtcagacccaggttctaccctcaggagacccttggcctggtggactcagaaagaccggctgcacccagcatggtctggtccaggacagagggaagcacaaggggtggggcttggaaaggggtgttgaaggatgcataggagtttgagggagaatggggaagagagggccttgggtagtgtctggcatgcagcttcctctgagcgccatcgacgaagaggtgctcccatctgcccagcgtgctgcgcgtcctcggccaagtcccctccctttctgagctgtgtgcttctgtctcgccatccatctgctgtccctgcctccctttcccccacctccctggcacactcacttcagccccgctgccctcccctggcctcagcctcaaggcctttgtggctacagttcccacttgaaggagtaccctcttccctcattctcttctcactagctctccagatgtcacctactcaggcagtcttccctgacctctggaatagtctccacccgtctctggatttactcaagttctttttttttcctcagcctgtttttttttggtctgtcttgccccagcagcatgtgggcccccaggcatgatgtcagcacatagtagaggctgggcagacgccgctgagcgtgtgagtcaatgctgagtgtgattctggcagcagtgccaggccgtggcgcgctcacagatctgaactgtaaatggggcctggggcagagcgataggctttctggaaggcctaccctattttcctggactctacatctctgaggtcagcctcctgcccatggtagggtgaaccccagagccctgagagtctgtcaggccctcccagggaatcttctgtacctgaaataaggccagatttacaaaataaaagaaggaagctaagaaagcaactgtaacgtgctcccctacagagagcagacaggttatggggggctgaggccctaatcctggctggccctttgtgaagaaataaatgcacccctcaagctggggacttccttgctgggagcaaggcaggcctggagggctcactgaggggttggtggctggattacagagggactgaggcaggacacctgggtgctaggcccagctctggctcagactggtgaccttgggcatggctcctctctgtgcctcatttcctcctctcaaagaagcttgggccaccccacctgggacttctgtgatgcagtgagcagaagccaagtactgggtcctaggggctcaagaaacatgctaggagtactcacggaggagcaagggacttggggaaatcatggaagacttcatggaggaggcatcctttgagcttggaggatgcattgcattctgagaggcagagaaaggcatttcatggtgaggggcgagctctggctgaggctctgaggtgtgggacattccagagacattggaagcccaaccctagctctctgctcattcctactgtgtccttttttcttattgattcataagaactctttatatattaagcacatgggtccgatttaaacaaacacattatttttcttttattttacttacgattggttttgacaacatcatacatatttttatgttggcaaatttcccagcctttcctttggtggtctttctggtcccaggatgcttcttgtgtccttaccttgtgtccttgctctcctgtgcacatgctggctgctcaggacatgtctgagactcaaattaagttgaagctggaaaatttacagctgtatgaaaatcagaagccagggtgcctttgctgacctgtgcctcccgctggggttcctgcccatcattccttcttgcttggagtggggtccagctgaggccctaaaggggcctgtgactctctgcagggtgaggcagaggctcatagctgtgatgaagggagagggtgggaggacagggagttcccagctggccagtctccatgtattcactcatggaaaccccattgcaaccacatgagataggtgctatgattagttccattttataggtgagaaaactgcggttcagagaggttatgtggcttgcccaaggccacacaggaagggatggagacaggatttgaattcatgccttgttgccccagaactcttatagtttcaagctctcttatggcccttgggctccccattgcctttgggatcaagtctaggctcattaatatgacatccgaggcctcctggggtgatgcctcggcctctgtgcctgcacacgctgagcttccctgatatgatggtggcaaggctgtgcccatctcttcacaccttccccacaaaccccgaatagtttagatcctggaatggagggctggcagggcttctgtggagtagctgggccagccccctggtttgcacacagtcagggtgggtcttgcccaaggcctagtgcctggagagtgaagctggaatctgcaccaagactgcaggactctggtgctcctagctgtgtcactgtgctatggttggtctcaggcggggttctctcccctgctgctcgctgctgcctccccactggcagatactcctctaggaagcacccctcctgccactgggttagacacctcgcctgggctcccgagggcccagcgagttgtgactgctgacttctcaccgtctgccctgtgaggcagggtgccccatgaaggcaggcgcccaatgcttcctcttcaagtcctcggtgcccagtgaggacttgaagagggagacccagagagggacagagccctgctccaggtcacacagcaagttggggcagagccaggagtcctagaagggccccaagaccctccaggtctcccctgttcctaggacttaacggagcccagggatggggcagtgtctgcgatggccaccccagcagagggcactactgtagggcctctgttctctgcttctcccaggggcctggggccaaggacaccctctctccctcctgcccccaccctctgtgaagaaggatgttctcaagatagaaataccgtcagaaacattccctggtgtttggtgtgactgtcgtccactctgtggggccagaaccttctgacctggcctcacctcagggcttaagggtggacgtttgccttttctggccgcttggtgcagcctctttctggggtccatatgtccagcccccatctttacgccacggaatgtgaggggtcagtgtcactcaaggttcctgcagcttccactttctgagcatcctctgtgggccgggcgcatcccgagcatggaacagcgaggcagatcctgcccttgtgcgttttgtggctccttgcgggccaggggggcttctgaggacatccagcaggccacagggaggcttgggcacagccagctttccgtcctgttgggaagcctgtttctgctttcagtgcccacgtggtgtcaggaacgccggtcacagtgaacgcctgcaggacccacactgctgcatcgtctctgtgggacagatactgaagccagggcttggcttacccttgtgacagtctcccgaggtgtgtggggtctcctcattttgcagatggggagtttcaggccccagtgagctggggggctgccaggcctctccagggagggtgacagctgccacctcccagagacccgctggggcgaggcccagtgcccggactgcagcttcgtcaccaccttcaatttcatggcacaccctctgagaggcctggcaggcgacaccagcctcgtttttcagaggaagctgagcctcaggaaggggaagtgccttgccctgttccgtgggggatttcagccccagcctcagcccaggccctgccctcccctgcgggacgctgtgggccagcccggcctgttggccctcagtcgtggtcatggggaagcactgcccctgcagcccacctccccatccaggattgtgaccataaccccgggaagcatttgtgggacttggcggggtgagctcacatggcggctgctgtggcccctgcaggtggcgggagctctggccagggcatgtggaaggctggctcctgtttgcagggtcctgccctgcactgtgacttcaggaaagtctcttctctgctctacgtctcagtacccctgtgtagaatagagctaattttgccttcctcctagataagaacaaatccagctggatttgtggtctggggaatgccccttccaggtagtagggagtgagggacgaggttgggagagcctgctgcaagccaggtgaccagcaggacgtggataggggctgctgcccacacttctggcccccacccctgcttggcttcccatggccctgtggcaatatccgaccttcgctgctcagagttccagctccaggtgactgggcaggtgacttagcttctctcagcctcagttttcctatctgtccagaggggagaattgtccctcctccaaggcagggctgtgagcatcgggatgactgcagccagctgccaagcatgcagggcttgcacagtgttggcccactcggggaagggggtggacccaagtccctgccgtggaggtccccagctgtgtgatgttggcttgtgacagaacctctctgaacctctgcagctcatccacctgtccatccatccacccatccatctctgaacctctgtgtccccatcagttttgaggatggaatggctgagagaggcaaagtgtaggcctgtggcttctgctcccagaatgatgagggatggggaagaaggggctggggattgggggacttggagggtgaagagggactgaagggccactagagaccaggcaggccatcccatttcagaacaagctgagagaggggaagtgactcactcaaggtcacacagcttatgaggggcagagctgggatttgaatctaggtctgtgtgcctctaaaccactgtcacctgtcccaggaggctaatgaggtgggggtgacttaccaacatttgccttaattccagccagaaaaaccagtgtgacaaaccagccttggctgtaaccttggaaagggcaggccccatgaactccctggctgggaggtgcggaggtgagaagcatgtcaggtggctcaccgtggagatcctcagagccccttcccaccaacctcttctctgattctcacggcacactggataggaaggcagggggatccctttgacaggtggggaaattgcatctttgggattgcagggaccatgtaggatgtatgtgtacccaaggcaaatctctggcaaattactgatgtgtgcccatccacgtagttagccatgtgcccacctgctcatccatctagtcatctatcctactcgcccaaacaccctatccatccatctacccactcatcacccaccctcacacccatccacccatccatctatccatctacccacccatccacccacccatccattcacccatctatccatccatccacccttccatccctctatccattcatttctctacccacccatacactcatccacctgtccatctatccacccatccactcatccactcattcactccacccatccatcacccaacattccatccatccatccatccatgcacccatcacccattcatccattaatctgttcatccacccactcaaccatatacccacccatccacccagccatccctctatccattcacttcttcactcacccatccactcattcactcacccatccatccacccaatcatctgcccatccatccatcccattcgtctatccatccatccacccacccattacccatccatccatccacccatccatccatccatccacccattcacccacctatccctccattcattcatctacccatccactcagtcacccacccatctacccttctgttcatccatccatccaatcatctactttcacacttatccatccatctatccaaccatccatccatccatccattcatccatccatccatccatccatccatcctattatccattcatccactcatccattcacccattcatccactcatccatccttcctccatacagccatccaccctcacacccaaccactcattcacccatccatccatccacccacccatgtattcattcatccatctacccactcatccatttatccatccacctacccattcatccctgcattcatttatccacccacccatccatcatccatccatccatccatccatccatccacccattcattcatccacccacccagctattcacaactggctccaaggttggcgttgggaaggctctgcaggtggtggctgggagtacaggctgagggcctgaattcctttgtgacagtgggagaattaccacattaactacttctctggaatagtaacaacaatagttccaaccttgtgtaattgtgaggattatgtgagatgatgtatgtaaaatgcctactatagtgtctggcatgcaataggcactcaataattgtcagcggtcatttttctctgacaccccatcttgttctgctcttctctggttctggatggttgctatgctgtgaaggtgtggggcatcaaaggtgcaggccagaggcccttccacctcctgtggggccctggggaagtgagcagaaatgtggtttcatgtggttatgtcttacttgtgagcccctctgagaagagcagcaccgcctgcagtaacttggctttactcttttaactttaggatgttctagtgactggatcctttccagttggtgcctgggaaatggcagccactactaattcagccttgaagacagtaccgtgcccactcagcaccattacatagaagatagaactcaagaggtaagagtgaagtcattgacatgctcttgtgcatctaggcattccttccaccagactctcatctgtacatccttcacccctccacccaccatgccatcctttcatcacccattcccccacccatttatctgctcagccttccatccacccacccatgcctccacccctccatccatcccctcgcccatgccatccgttcctcacccattcccccacccattcatctgctcaaccatccatccacccatccttccacccacctagccagtccatctatctggtcacccctatcgtccacccacccatctgtcaacccgatttatccacccatctgcctgaccacccacctgttgattcaatcactgttccacccatctcctcatccatcccattcagctgcttagtccttcacccttcatctggctggagcgcatttcctgggtgcccctctttgctatacctgcatcagcctctctaggcctctgagcttggtcagagatggggcctgggcaagatcaactctcacacaaggtgggaagtagcttctggcctgaacgggaaaagcccagtgctagaggatcctaaagggggccaggggaggaggaggaggtggaggaggcagaggagaaggcggctcagtattgtggggcagaaggaggaggaggaagagcaggaggagacttggtgtggggcatccaggaggggaggccagggttcaagagcctttgctgtggagaggctactggagaccctatgaggaaggcccaggagacaaaggttccagcgcaagtagtttcctgggaggtgatcccaggaaataaggaaatgaggtgagaaagagaaggaagtgataaagggcatgtcattgatacagttactgctggggcactggagccgactcccgctggggaggccagggaagcagtgcccctcccaggggcagcttgctggggcccagccacctgctcccatcagtcactgactgaaagctgtcctggcagcatcagctcctcagcctgccctctgaatggcagagcgtgcccatggctagagagagcttttgggcagagagacactgtggttggtgtaggaattgagacaggtgggcctgaggtggtaagggcctaggatatcagtggggcacccaccaccccatgccctgcacacagtgatgtgttgctgctgcctctctcctcaggcctagcctgcatttggcataggaagccgtcatggcattggacccaaatgtttgagggccatgggttagcttcgtggacagaggtcagctgagtctctggtggggaggtttggcctggaaaggggattgggtgtaagaggtcatcatcttcttcccagattatgagacataggaatgccacccaccactctccctctcccctccacaccagcctgggttctcccccatccagccaagcttcctcactgcccccagggtgcccaacacgtctttgcctcccactcctggctctggcagtgtcccccaggagtgcccctcctggctgcctgtgcccagcctagccttgatgtggtcctataccctgggcagggcctgccatgagggagagcccctaaccctgcagccagccctgcctctcacaccctatgtgacggagcaagggcaccggctcagagcctcagtctccccatctgcaaaggaagggctgggctttccaggccccagtgctgcatctgatgaatggtgcctggattaggaaagattctgagctgctctggatgcagtggatgaagctctgtggctgaggaatggtgcttgcctgggcgaggctggagcaggcaccttgggcggggaggcgtgcgccagccttccctgcattgagtgatctctgaggggtcttccaacggtgaggcttgatcatgaggtagagtgccccatctccgaatgagggtgagtggccgtgggttggagtgctggtgagggcccttgaacctgtgcttttgagtgccgatttgcagcagtctacatctcatcaccacctgggactgcaggggcttgggaccaaaaggattgcagtgccacgcacacagtcaggcctcaggtcttggtgttgtggggcactggtttcacccctacagcccagcctggaagcttcactcctgaaaggctgtgtaaccatcacagtgactcaatcttcctaggcttccgtctgctcatctggaaaatggggataataatcacagtgtgatggaagggattaaatgaatcagtttattaaagctcttagaagagcacgtggcaggtagtaagcacttgatagatactgagtgctgtgttcgtgcctcgtgaggcgccccagctagctgaacagtctctgcatgggggatgggggctgttggcgcctccccctccgagtccctatgtcttaccctgggtgatgcaggcgcctgcactctcccttccggtcagtgctttcttggtgtctgggaatgtgggtccaggccttgccctgagctcctcccggatgtcaccgaaacctgagaagcccagggcctcagggcagtgggcatggggcatccagttccatccggaagcacctcccggtgactcctggaccccacccttaggtcacgtggcagctgccgtctggcatcctctctaaaagctcccagcccaggtcctggtctgttcttcaagtggactggtcgctgggaggctgcgtctgtaggcactgtggccagcaggaaagcagggatctccgggggtctgccgggcccgtgctctctccccactgcctgctctctccctcctgggtttgcttcactgccccttggtgttgaaaccgccttgtctagctcaggtagtgtaccccagcgcccctctcccattcccctcccggcgaccctgggaccctggcaggccaacctgggtgtctgcggaaaacggtcctacctttagtagtgagcaccttgtcttggcccttgaattgctttgtgacctgggacaagtctctttttctttttggacttggttctcccatctgtgaaatggggagccagccttcttgcttgctaaggcctcttccagcaaaacagtttctctgatttcatgtcttgtctgatttcactgtatgcaccccattgagcaagagccaaaaaggcctgtgtgtccctggtggaggatattgtcctatatttcttatattgcgaccttgaaggccgcatggttgtgtaacatcttgccacacctgtgtttacgcaggagtgttcttgagacattgtctagcttgtggtgctagggtttctatgccagggtccccttctgggtctgtctttgtggtgctgtattcaccaagtgcccagtgagggggctcccagcacccctggggagggtttctctctctctctctctcacacacacacacacgcacacacggcagagcagggctgtgtgaggctgaggactgacattctgggctccaactctctcttctgctcagtttccaggggtcctgggacaggtgtctttgtcagtttttggctctgagaaatgagggagtggggcatgaacttgaccttgttgatgctctctgtgtggtaaaaccacgcagagaggaacgtcgacagaagtgggggtttccaagcctgtatgacaccatctgggcaggtctgcggtgcccagccctggcagagatgccaggagctgtggcagcaccctcaccagtctggtagttggccagtttcgaggccgccagctgctgggagcacatgcagaccgggctctctggcctttaattcttgtgattctgttccttgcaggctttgagctgctcggagcaggggctggagcagccatgacccgctggaagtccctcaaggcccctgggccacacaaatccagcccctgtcagctggtggcctcacgccggcgtctgagtgccccggccctggctgcctctttctggagggtccaggaatctggggctgagcccccttcccagcacagcctcaggggtcccccctgctgccggctccctacttccaggcccaggcagaagcagtgtccaccattccggccctgcgtcccagctcctcagcgtcatggtgaggtggtcagccacagcggtgttgggggaggacggcagagtaaggaaaggcatccctgcagagcttgggggcccatggtgggggacggcgctagaggtggtttaaaactcaactctcctgcttaatggctgtgtggcctgggggaagtcacttaacttctctgaacctggatggtggctgcacccccgggttgttgagaggacgatctgagggcagctgttgatggatctgtcccccaaggcgcccaggaccccgcctgctctccctgtgtctctctcaggcggcagttgctgtgtgctgctcggaccagcgggctcggggctaagcaaccaggcagcccctgggagtgttccacagcctggccgggcaggcggctccaccatcacctgttgctcaggtgtttggagcagagctcagaggccgcacccgctccgaggcccagactagtgtggacgtggccagaagctgggtcacacagaccggggctgagtcctggcattgctgcctcctgcctatgggactgggacaagtccattctggcttctgggcctccaggtccttgtttgtaaagcagggtggcccacccctccctggagggcttgagaggcctgcagaaggctgtgtgcagcgcctggttcacagtggtgccatccccccaggatgttctcttggggcctcagtgtcttcgtaactgagtaatgtggctgcaggtgtgctaagggagaaggctttgtctagctctgaggttatggtgtgactggactgggactgggggtgctgggtccctgtgggcggggaggggtgggcctgtccagctcctccgtcggggctaatgctggaaggcccaggtctccctgcttccagcctagcccagccaaggcaggctgccatccagatgtggctgtgggccaggcggtgccatagcccctagcttgcagatgccctagcctgtcactgacaggccagtgtggggcctttagtgggggcagcacagcctgtgtgtcccgggggtgggcacgtcagtggctgagagcaggctttgttctggctggcatggatgccctgctgcggggcctgtcctggggtgcctgaatgtgcagtaggctggcctggagccaggtgctgcctgcagtgagctgagggtggtgctgggaacaggtgacacccctgagcactgcccaggtgctagggtagcagccttgcaatcttccttagagatgcgggaagcaggggctggggagggccctcggctgaggtcagccagggagcagcccatgtctgggtgccagatcttaccctctttggcactgctggtgaccaagaagctgcaagcatggcatgtgggtggacactgtagagtggggcatgtgggtgtcaggagggtggtgggacccagcttggggtgttcaaagtgggtggcgacaggggtggcaggccgcattctaggccctgggaaggacaacaagaagcaaaagagaaaacgtctcacgcctgtaatcccagcacttcaggaggccgaggcaggtggatcacctgaggtcaagagtttgagaccagcctggccaacatggtgaaaccccgtctctacttaaaatacaaaagttagctggatgtggtggcgggcacctataatcccagctgctcaggaagctgaggcaggagaatcgcttgaacccaggaggcggagatggcagtgagctgaaatcgcaccattgcattccagcctaggtgacgagaggaagattctgtctaaaaaagaaaaaaagaaagaaaagaaaaaaagaaaatgtgctacccttagggagtggtggtctcagggtggggttgatggttgagtgcccctggctacgttattgttattgctgccgccattgtgcccttagaaggggcagtgctgtggatatagcagggatgggacatgggtcttcctggggcacaaggaggcctctggtgccaaggtggcgaggcagtggcaggatgtcttgcgggagggtgtccagggtgggtttgagggacagcctggggccaggggctgtggccggaaggggagtccgctggaggaggctgggaggtgaggtccgaggggtcaggagcttccctgtgcaggtcctgcatgtcctggggggcctctggcattgagcaggggagggataggcaccgactcagcttccacaggccctctgtggctgccatggagactggggggccatgggcagaggcagagaggctggcaagttgtgccccgaactggctgggcaggcactgttagattcaggccttgagggtgggagaaggggtcggatcctaaatagactcttcagagccctcagtgtgggagtgaggtgtggagctgaggtttttggctggagctgctgggggcccgaagggggtggccattcgcactgggaaggcggagtggggagctggcttgggcaagaccagagcacgatcgtgggtcaatcagggtggaagcgtcctccagtcacgtctgggggccctgggatgggggtagaggagcccggagccaccagcccagccagacatgctgtcgtctctgttgcaggagccgccctgcctggagctagcctgggggcgagccagggtcccccaacccccgggatgaccgcggccagccgggccaacccctacagcatcgtgtcatcggaggaggacgggctgcacctggtcaccatgtcgggcgccaacggcttcggcaacggcaaggtgcacacgcggcgcaggtgccgcaaccgcttcgtcaagaagaatggccagtgcaacattgagttcgccaacatggacgagaagtcacagcgctacctggctgacatgttcaccacctgtgtggacatccgctggcggtacatgctgctcatcttctcgctggccttccttgcctcctggctgctgttcggcatcatcttctgggtcatcgcggtggcacacggtgacctggagccggctgagggccggggccgcacaccctgtgtgatgcaggtgcacggcttcatggcggccttcctcttctccatcgagacgcagaccaccatcggctacgggctgcgctgtgtgacggaggagtgcccggtggccgtcttcatggtggtggcccagtccatcgtgggctgcatcatcgactccttcatgattggtgccatcatggccaagatggcaaggcccaagaagcgggcacagacgctgctgttcagccacaacgccgtggtggccctgcgtgacggcaagctctgcctcatgtggcgtgtgggtaacctgcgcaagagccacattgtggaggcccatgtgcgcgcgcagctcatcaagccgcgggtcaccgaggagggcgagtacatcccgctggaccagatcgacatcgatgtgggcttcgacaagggcctggaccgcatctttctggtgtcgcccatcaccatcttgcatgagattgacgaggccagcccgctcttcggcatcagccggcaggacctggagacggacgactttgagatcgtggtcatcctggaaggcatggtggaggccacagccatgaccacccaggcccgcagctcctacctggccaatgagatcctgtggggtcaccgctttgagcccgtgctcttcgaggagaagaaccagtacaagattgactactcgcacttccacaagacctatgaggtgccctctacgccccgctgcagtgcgaaggatctggtagagaacaagttcctgctgcccagcgccaactccttctgctacgagaacgagctggccttcctgagccgtgacgaggaggatgaggcggacggagaccaggacggccgaagccgggacggcctcagcccccaggccaggcatgactttgacagactccaggctggcggcggggtcctggagcagcggccctacagacgggagtcagagatctgagccaaccttggccgacatgcagcatccacccccggctggggagaggccccgcggtcgctcaggggccccgggtttgagcagaacgggcccagtgccctgggttgcagactcagtagcgttttagtcgttttatgtttctttgcaacggcctcagaagtttggccggagagggggcagccagagcggcagcccccggcctcagaggctatcacaggctcagggcaaagaagtggcctcctggggggccaggccacgagggccagggcttctgcctgaagatggagctgcagcctgcggggaagcagctcagctcgatggtgggcccagcctctgctgtccaaggctggctagctgcggtgctccttgctggtttttaacttggggagaaacaccgggtttcagctttcttgaccttagcttgggtgagactgtttacaaaaaaaaaaaattaccatgcaattgaaaaaatttttttttaattcacagggggcaaaaagaacaattagaattccatgggtctgccaggatgcagcagctggctgaaggctccagagggttccccgaggtgggactggcctctccccgtgtgtgtgggcaccacagtccctgggcaagcagggtgctctgggaccgcacttcatcgagctcacgagccagctaggctctgtttgtgatagaaaaatcaagaccatgttaatgatcgtaataaaagctttctactgtcgttggggtggtgggtggggctgggaagaaactggtttgagcttttagagtttgcctttgtaccttagagatgtgtctcagggccaggcatgggacctgccatcgagggttcctccccgcaccctcgattttcctgttttgcttctctctccatttctgtccaggcctccgcccaattccacagtgaggggtggttaggagctataggccgggatggctccttgggaagggaagtcgggatcccaggctaggaggaagctggcagccccgtccccactgggcccacagtgtgagtcgtgccttagagactccgggttgtcctgttctttctgggcttgctcatctccccccaaccctgtcccaccccacccctcccatacctccactgctgaagttcctccagcccctctgtctgccttgtgaaggtggcaggggccaggtctgcctgacataggaccacatcctgtccctccctcacctggagcagcacagcagagttcaggcagggcacagccaggccctggtcagcgctgaatggcagaggaaagatcttaggaaaggagaggaatcgccaccccctcctgccaactgggatgactggggagggccacgctcattcaaagctgaatcagaaaccagccgtggaacagaattcctgccgagtcttccagggccgctcctccaccaccctcccccaggttgaggcactatggcaccctcatcaggaagaggtttggggtccccttgttgtcactgctggctctgccaccccatcttgttcatggcagctggttgggtcaggtccatggtagagccaggcccttcccagggctgcggagaaaacctgctctcttctagtcgggcttctccagaagccagtaatcagaaaggatgtgtctcctgctccaactctgcccccgagacagctcagagccagaaggcaccccgagacagctcagagccagaaggcaccccgagacagctcagagccagaaggcaccgaggactctggcccaagtggggaagctgaggcagagagcagagggggtcatgcagtgagtgggtggggtgcaggagacagagaggggctgggggcgtggggtgggggtgtctgcctcttccctccacctcctcccctccttagcagctgaagactcagccctgaggtctggggcaatggaagtcaagacacccgacccctacatcctggggtaggcccgactcagcatcctgtcccagcttcagccccacactcatttctggcatagaagattccgccgaggcagctctttcctctcggggtctgccaggggtgcctcagctggttcctgctcccaggcctagccccgaagccttaggggccttctcagccttagccctgggtactggggtgaagttggcaggggagagcttgacacttcgcctccctgatggccatgctgagggacagtggtgaccctggtcacttggtgctggtgtaggggcctgtgcccttccagggccagtgagacagccttctactcccccgacccagagctgagtccgaggaccccaggcccacctcctggccctcttggaggtctgtgctcttacctcccagcccccaccctgcgggagagcagccccagcgcctcatctccccaaaggcggcagatgcttgattctcctgccctctttcttccttccctcgtatttatttatttatttattgcttgtgctaaagaccaaaatagtctccctctttagtgcacttgaagcgggagggcggatgggatgagccaggagcgaggaagacttggcccctggggagtgtgtgtgtggaggcgtgtgcctgtgtgagcctgcatgcatacatgtgtggtgcacacatgcacactcggctcttcatgtgtatgactgggttagtaatacagatacgtgatctatacgtgtgtgtgtgtgtgtgtgtgtgtgtgtgtgtgtatgcaggcggttatgtgtctgtctacccccaggtgtttccgtgtacaagtttcctgtgagggagggcacccacccatcaggttgggcactggcacaggtgaaccccacagtccccgaccctctgccctgattatgcacgtctgctcctgagtggagcttgtgttccaggatgagacatctggaggtgagcgtgtgcgtccggctcgtgtgtaggaggctgtgtgtgtgcccatgtgaaaccgtgtacttgagtgtgtgtctgtgtgcagcctatgcctgctgctcagagcacggtggccaccccctgagcctctgctggtgctgtgctgcgtggtccccacccagagggtcctggggggcggggaggagccaccgttgggaggcccctgtacggggtgtctgccctgcgtgagggcatagaatgtcaaattattttaaatggtgaaactggagagttttcatgttattttcaatacatagcagtatctaaagacgtaggcgatgagactagaccacattaaatgcattttgatctctttgaggtcccctgtgttgagatgtgttttctgaagttcccctgcatggctccacagcgtgctgggcgtccgcccggcttcctcagcctccgccttgggtgggggtttcctggggcttcctcatgggtgagggtggggcatggtggcagctgttgggagatggaacagaactcagcctccttgcagctcccagtggtctccagcaagcacacagggcttgtcccatgatgtcacccatcccaggcggcagggccgagcctcctgccttcccttccttctgcaaggatgtgctgggtgcctgctgttgcagcagcgccctccccagctgggggaggctgacctgagacaggcaactcctttcccaggaggggaagccctgctccagcttgtagcaggcaggggctgaggaggagtttcagagcgtgccaatgtctccactgaggtgacgagacaagcctggagtggggtgagggaacacacacggcccagttttgggaaactagactttcatctgtaccttgaggctcagccccagatctccaaggtcttcagcagggacttgtggggagagaattccttcccttcccaaactatgtgagtggagagttctccactcctctgcatcagcaaaggactcagggcaccctctttctgcaggatttcgatgatgattccagacaaccccggataagaatcccctgcctgagtcattcctgggtgatggtgccgtgcatggcagaatgtggagcaggggcttgggtgccagggcctagggggtcatgaaggcttcccagtgggagctcccttgggttggacttggggtgacccggggaccctggaggtggcttggtttggtggggacctcctttctgactctggggccctcctgggaccccagtagcaggatcaaggccaactggggccaaaacacggtagcatctgtcttcactcaagccctccgggccattcccatggcgctgactggtaggcatgaggccctggccccagttggtgctcaacaaatgcttatcgtagagtctccaggtgcgctgtcctggctgtactaatgccgcaaagggccctgggtcagaatgcaggccactcatttgctgggggacctcctgtgaattcctttccccctccagcctcggtctcctgatctgcaaaaagggggtgttcataagaatggccagctcacaggtttgttggaaaggaggagaaagaaccctgacatagtgagtgctcctcagtgcctgccttctgctaagtcagattgcactggcactgcccgccctcctgaggggcacccggaggtgctgctctggctcaaggtcacagcaaggaacacatagcccaggcctaaccccaggtctgcgtgacttccatgcacttccctgcctctccagggatgatgtgagcccaatccagaatctgctttaaaacaggtagagctgggatgggggtggagagcttgtgagcgttcactgagcgcctgcgagcttgatgtttgaggtctgtcaggccccacccttgatcttgggctggcccgtgtcagcaggcctcagaggcactgctaacctattttagaggaggttggtcgagggaagctaagggacttgctcgaggcccccacagggtagttcctcaagctgggatctaagccaggccctgggcccttcagtcagttgacccagatgctgccaccctgctgggcactggacacctcagggcctctgcctgctggtgaccagggctgggctgcggtctctgccagtggaggggtgccccagctggggcctgccctggactcatctccacttttcccttcctaaaaccggtctgcagggaggacccccacaacttgggaggaatcacagcccagatcagagctgcctgtgtgctccccaacagcagtgggggccccaaggacacatcggacccccttcagcccactctccacccggcaccagagtggtcttcttacaaccagaatcaggccttgcagttccctgcctgaaaccctccctggcttctccttaacactggcaataaaaccccagctgctccttgcccgcttcacctctgcaagcccgccccgtgcagcccaaccttccctgctctcactcctgctcctgcccctctgctgcaggcaccctgtcccttggtttccctgacattccacatgtccccccaccccaggacctttgtgcgtgccttccctctgcctgacactttcccctcaggtcttagcagacccagctcctcaattttcgagtctaggcctttccggacccagtgcgagggatggcagatgctccctctggaggcagcggtcacccccaggcttgcagtctgctgtcctcaccaggctgcgagctctgcggggcagggactgccgtctcggtccccgctggtgcccagcgccaggagcagggcatggaggagctccatgtgtgcttggatggggggtgtgggccctgcaggcgtctctcccacacagagggctctacaggtcttgccacctgaggccccctttttgctgagccagacaggatggggcccagccaccggccacacccaggggagagcagcccagcctggggtaactggaactgggaaccaggaacagagcggacaagggcttttgtgctgaaggcgatttgagcccaaggaaggctctgggtactccacccgctttcctcctcggtgctgccaagaaaacatagaaggcggctcccctttcacccacagctggactgggacctggatggcctggcttctggactctgcccttaagtgtttatgactggccaactctgggcctcagttgccttctatggaacaagagctccattcattccttcaaacaagtgtttatgagctgccactgtgagcatcaggggccaggtgggaaggaagccaggcccagcagatggtgaacaagagtctgggcctgagtcctctacaagtggggattctggtgcagggaaggataggggagaggggagcagcccaagcaggaaggagctgaggagggatgtgggtgccactggagcccatcactgtctggcactcctaggagtgtgaagaggggcaaggcgttgtcctccttaggtgaggggggtggggctgcggtggcggctgttgcgctcatcagtcactccttgcctgcagccaccctgggagaggaggtggctcctatggatccaggactattctccagaggagggtggcagggagatgggcactcctcccaggaaccggatctgggtggccccaaccatgtccactgcagcaaggagctacagagcagcgtggtcccgggatccagcgggacacatgcaggggctgcgtccggaggcacggaggcctggctggagggaccggggacctcccacaggaagtgacacctcctctgggatctgcgggatgagtgggtgtttgccaggcacacagggaagtgcttcccagggagagggacaggcacaaccaaaggccttgcagtgggagacagcagaaggaagatgcttggctggggtaggcgggtcaccgagagcccaaggactctgtgcagggcccagcttcagtcttgttcccagctcctccccggcctccaccatagccacagcgtggctgcattgcccaacccagaatgtcagcccttgggagcaggactttttgttctgctttgttcatagctgggtcccagccccaagaactgcaagcactggcacccagtaggcactcagtaaatccttagctgcttcaagatgtaaaaggaccttcaagccagagttggtgcagtgtgggcctgtccctggggtgcctgggaccctgctgcagggcagggtagggtggtaaccaccagtgaccaggagcaggaagggatagggtccacaaggggtcccaggggctcctctgcacagctaatgccagaggtgctggggggtgggccacacaagcaaccccagcctcaaattagggacccaccgaccaggatccactgtgctgtcagaataacatttcgaaaggcaaaaaataaaacacattgagtttcaaaggaaatctgttttatggaaatgcagttatcaaaatatgaacagatacattggtggtataccaatggctctatttcctcacggacctgctaatggcctctgcctccctggctggtgagcacagcccctcccaagggggccagcaatgtcacagggcatgggaatgcctcctgatctgtgggcgacaggatagtaggcactgggcactgctcacccttgtctgtcaaggaagaaatcgcaaaacttctctgagagtgagatgaagttgagattgaatgcttctcatttcccagtgcacgtgccctgaggcttattcccagaccctgagggagttcaggccacaggggctgggctgggccagagtaatttcttgaacccagtgctgaatctcagagtcagagcactcttgcccgccccaacccccagcccccaagtctgctcgacctgagggaggatggggtgctccctacggaacaccaggacagttcaagggtcttcgccctgcacttgtttggaggctgcaatggtgggtcgtggctttcacttcatggctgttagagggcactccctttgcgcttagcccagaagccgtaaacactatgaatgccatggacaagtgaatagcagggaatgaaagctaggggtcctcttaggcatgaccctatgccagtcctggagccacccagagaggacatctgaggactctgaagaccttggctgcactaacttctctgtgcctgttctctcctctgtaaaatggggctgatgatcataaagccgcgggtaagaagtaggcaaacgcctgtggcttcacctggcacatgggcactgcctgagcaccagctttcctctctagctgccatgatctggggtacaagcatcccaggtggggcaaccctggactggtgctctgtggctggaggagaaagggaaggccagtggggctgggccagttagagccggggaggaggaataggctggggctggggctgggatctgctgactccaagtgtgatagaagcaagaaagacccctgacatgtttgacttttcaggatcattcctgttgccatgtaggaagcaggccagggaggagggccctgggactgggctgagtgtgcagcccaaaaaggggcccgaggaaacatcgcggcatccaggctggtctgtggacttgggtgggagcagccaggcagatggggaggactaaggaggagaagcttgcggagagtgatggcctctctggatgctttaaaatgcaaacaaaggcacagccactttggaggttggtttgcagtttcttgataaagttaaacgtacacttgtcagacgatcccaccttttgtcaactaggtactactcaagagaaatgagactcatgttcacacaaaaacttgtaagtggatgtttatagcagtgttactagtaatcacccaaacaaggaagtggcctacatgtgcctcacctgatgaggggacaagcaagccatggcccaccccgagatggaagcgtcccgagcagggagaaaggaggatattgacacctggcaccacaaatgtgtcccaaaggaagcggctgagtggaaggagccaggccccgccacttcctgctgtgggtcccacgtgtgtccatggaagctgtgaatagagtaggggatggagaacacatctgtagctgccaggggctgagggtggaggcgtggttaccacgagggacaggaggcagttttggggcttggtgtcttgatcatggctacacggatatgtgcactttgtcaaaactcacaggacggtgcacagcaaaggatgagtataggtacattacaccttaaatttttcttaaagtggggaaagaaaaagaagttgccacaaaaaccttgtatgttgagccaccagcctgtctggatttcagacacattggaggagaggttgggtctgtgggttgagactggcgagtcaccagctgtggatggagtcaagtgactgagagattaaagacaccagacacctagacactgaggatgtggcaaggcgaggttgggagagggcacgggggtggaaggcattgggaatgacagaggcaaattggtaggaagattgacacacagataaaaagagatggttggatgaggcagaaagacaggcagagagacagacgtggactaacagacaggcagaaagtggagacagagacaaatatccactaacagcaacaggtagacagaaagatgctgtaaagatagaaagttgtgtaagtggatggatggagctcagggtagctctcaggtggacacagacagaaatgcagacagatgtcttggcttgcgagtacatgaacagcctgccctgattttctggggcattcttctagatcttggatctatggtgctggcattgacttacgccctctttggagtcagagacgactcctctcgctcagtgccctgctccacacttccctgctgctgggccggccactgctgcacaagtggctgcagaaatccctcctggcagggactaaggcaggcaggctgggctgctgtgcaccccgggccattttctgagttgggaaaagggtgctgtccaggtggtgtgggccgtgtaaaggcagtaaagggtttcaaaaggcctgtcagtgcatatcatctggagtagggtgtgtgctggggaacggggaggaggaggacagagaaaataggaaactttgagcttgcctgaggaagaccatccacatggattatgaaggatggctcatattgactgtattttcattcaaatgtgcaaaactatttactgaatttttttactgaccggaaataactcctgacttacagaatattttcatttccaagttacactttaccctgagttacatagcaggcgcatccgtagtgattctgcaccccacgccctcgccagcccctggaagacactggctggcccttggctgaaatgacccaaatcaaaagcccctgcctttctgctaatgggcgttggggagattgaccagcaaagagctatggacaagaagcaggactgtccatttaaaaaggacaaaaatcagagcccagtcccaggcctgggcagctcccatcagcgtcccatcccccttgctctgaaccagctgtggcccgcactttttcccatggccatgcctgggaaatgaaggtgcagggacatgcaggcgagctggggcgtggagtcacatctgtttccagaacattcatgctaagggaggaacagggtccgcattggagaacatggggcgggtgactggaaaaagggagctagagccacttttattgtttcctggggtaacagaaaacttggagccacaagtgagtcccgggagagtttgggttaactggccccgaagccatcctgtgtcatgtgtgtatgtgtgttccactatgtgtttttccctgtgtggcctctgtgtgtgtgtgtttgcctgaactggtttcagcggtgaaaatcctggtgctgacatggacagaatccatgaaagcatttcgagtcctaagtcagctgacctatgttgggatgtggcacatgttgcatcgtctgcctttgaaaagggattttctgcgagggcttgcaatgaaggcattctgctcagaaaatggcggcaggaagtcatgcccccaaaaggagccattagtgaatcccactattaattgtaagtcttagattctgggctcaatactgtcattttcatgatgttcaagtgatataaagggccaaacaatgtgaatctcaaaactaatatgggaatagaatacttcctgctctttgactgtttgactaagcacatacatcaacctttccatatttttatttattttattcttgcttgttttgggtttaaggggaaactttcatgataattgtaccctgaagccattttcctggaatgtgtctaggcaagggattccaactggaacccgtggaggccaggaaaacactagtcatcaggatgtattgcttcatctggggaacaccgtaagggactcaactccaggcactggtgtctggctcttgtgcgtttgctaaattgacatgactccaggatctgtagcaggcccacacatccttgatgaatacagtgaagtcttgtttttaccagcactcagttggccaaatatcctttccagcaatgagatatcagaggacacagtgaagttattcaaattagggtggaaaaatcaccaaaattcacttaaaatcatgtttatcgaaagtcccagtggggtcaggttaggtagtaaataacaatacagaatgaatattttaatgatattccaattttaagcttgtcttttttcctttgtgtttcattatttactcattgtacattcacagaaatacatttgctaagcaaagagaatgacatttggaagataagtgattaaatagtgtctaaactagttgcaacaactgacaccaccaccagtaacatgggctgtttattgaactctggcaacaattaaacatctattcatcagtatctacgacacaaaaataaaacattcatctctaaaatagtaaggtatatgttcaaacaatgcatccttaatttttttttagagacagggtctcgctgtgttgcccaggcaggtcttgaactcctgacctcaagcaattctcccacctaggcctcccaaagtgctgggattataggcgtgagccaccacgcctggccatccttaatttttaagactccaaattaagttggaatagactgatatatctaaatcagatgaagcatgtttccctttaaacgagggaacttacaaaacagaagtatttttgttacgtgagctaagaggcaataaagccttatttgacagtgtgctaggtacccacgatggcagcatgaagacaaaaacaggaggaatcaaagcaattgtactgtgcagataacatggttctttagggtcaaaggaaggcttcctttgtgctctattaatgaagcatagtattcatgatgcatgaacgtggaatgaaatcccaatgtcctttggcacagaaccacactcatttcatgaattgttcatgaattgttgatggctgcttttacaaaaccatggcagaattgagtagttgtgacagagaccatatggcctacaaagcctaaaatatttaatatctcaccatttatagaaaaagtttggagatctctgatgtaagctccaagaagcagccaactttgtctgttttgtgcacagacattctagctcataaggaaggcacttttcaaattatctgtaatggatgaatggacagacagatgggcggatggacgcacggatggatggacagttcccacacagtgttggagttgaccaatggtcagaccatacatttatggcagcagaatctacaagctaatgggagcttatcccacaggtttcagccacttactatgaagcaggcttagaaaagaccaagagtggggctctcccaggaagaagtgatagatggggagcaggtggtgctgatggaaggggctgagtggggtccgtggaggccaccatgggtgaggaggacgtggaggctacaggcgctgatggacaggggaaagttggcattagatgccagcctgcatgacccgagaacgcagagcagctcccgtgatgaggctgtacccaaactccactttctaaattgcattttctgtccctttcatccgaatcatccctcacctatcaaaggacttttccacccctggctcctcctgtgctcgcccaccaaatgcaagggagctgttttcctcatgctatgggctgtgtccccgcaattcatatgttgaagccctaaccctggtgcctcagaatgtgactgcatttgaagatgggatctttaaacaggtaattaaagttgagtgaggtgatgagggtggtcctaattcaatcggactgatgtccttataagaagagattagaatgaaggtgtgcacagagggtcaaccatgtgaggacacagggagaagatggctgtctacaagccaaggaaaagcctgaggtgacaccttttcccaggatccccgtggcagactgattgcatttgatcacttccaggatgaagagggcagcaagatgttctccctggaagaggcacttactctgaatatgggcttatcttctctgcccgcaatccttccatggaagtatgatctgttaaccacagaccttttcaccatcatggtgtcccactcagaattgctctgactcaggaagctactttatatcaaaggaatgtggcaacgggtcagtgcttgtggaattcactgatgctgccttgttccctgccttccaaaagcagctgatctgggagaatagtggaatggagatttttctctctcaggcaaaggaaaaaaaaaagaattttacttgattatgactttctctcaatagaaacaccatattgccaaatgctgcagacactaatacgaatggatgacaaggcagcagtccttgccagcacactcaagcagggtcagagaagacacattgcagtgggtggaatcacggcccctgaattatccaggccctcacccctggaacctaggacagttccctgacacagagaaaggatctttgcagatgtgatttaaattaaggtcttgagaagtgggggattatgatagatgacccaggtggtcctaaatgcaatcacatgtgtctttatcagagggaggcagagggagattttactacagacagaagaggaggtggccatgtgaccacggaggcagagggtggaggtggccagcagccactagaaactggaggaggcgaggattggggtctcccggagcctgcagagggagcgcggccctgctgacaccttgattccggcccagtgaggcaggtttaggactcctggcctctgaactgtgacagaataaatatttgttgtcttcagccaccaagtttgtgctaatttgttacagcagccacaggaaatgaatatatccatgccaaaattaatacatgcattccattttatattcttttccaaccttaaaataaaaccaacaagtgcttccagattttcttttataattctctttgtgcattcagttcagtaaatgttcaaaagggtaatacgtttataaaatgtgatgccaaattgcataaaattgaccagactaaaggggaaaatttaccattttatgaaataaaatataatttacagatcaccagcattaatttatatcatgtcctgctttgggcttccaaattctgttggcaattttaccctggaaaaatatcatgaaccaaataggaaaactggtattctaaatacacttccttcatgtgacacatttcttgtgtgtggatgtaatgagaattcaaaaaaagaaaaaaaagatgtgtttttattcctccctttattgccaaaattaaggcagtaaaaacaggcaccaaaggaatgagttaagatagatttagaagaggacaagtggaagccaggcagggcagaattctaagataagggtcaagatcctcaccctcctcctcagcggtggccctgggatgtgatgcgatgtcactcccatggttatggcacattacatggcaaagacgatttccgcagatgcggagatacaggctcttctgatggtcttcaaggggaaaaagccatgttgtggagacagccacctggtggggaatggataggctttaatccttctttaaatgtttggtagcattcaataggggagaatgctgtagtttgcatgtttgaccccttaaaaatctcacgttgagatttatccccagtgttggcgatggggcctaatgggaggtatctgggttatgggggtggattcctcatgaatagattagtgctttccctcagggtgagtgagctcttgttctactagttcctgggagagctggttgttaaaaagagcctggcacctcctccctctctctcttgcctccagtcttgccctgtgacctctgtgcacactggcttcccttccccttctgccacgagtggaagctccttgaggcctcaccagaagcagatgttggtgccatgcttcctatacaggctgcagaactgtgagccaagcaaatctcttttctttataaattacctagcctcagggattcctttatagcaacacataacagactaaggcatttgctgttttgtataaatggaatcacacaacatgtggccttttgtgactagcttgtttcacttagcatcattttttcagcattcatccatgtggttgtgtgtatcaggacttcattctttttatggctgaataacaatccattgtatgtatacaccacatttgatgcactccccactccttcatctgttgctggacacttgggttgtttaccccttttggctgttatgaataatactgctattaacactggcatgcaagtatctgtttgagtccctattttcaatgctttcgggattatacctaggcatggaaatgcagggccatatggtaattctatgtttaactttttgaggaaactccatgccgtttgccacagcggctgcaccattttccattcccaccagcaatatacaagagttccaatttctccacatccttgccaacacttgttattttccattaaaaacattacaggcatcctagtaggtgtgaagtgctatctcattatggttttgagtttcatttccccagtgacaaatgatgtgagaatctggtggcccagtgggcttggagattcactgggctggatggtgggaagggttcacctgcctccttcgtgccctcccagagctcaggatgctttgtgatgtgggcctaaactctagtcaggagagcacattctttgctcaggtgcctgaggtggctgtgagcttcagatgatgaagaattttgtttggtttcttctgcattttagtgagccctggaactttggttccattttttcatttgtatggagttgggatcatctttctgccatctgactgcattctgtggtgtccacatttgccagtttggaaaaaacatgtacccaaatcaggtaatgaaacccaagggctgcccactgaagcagtagactttcatcttcccttcccaactcccatttttctaaatctattattgggatggaaagacctagggatggggactcttgggagatttaaacatcagtagtctagaataggttgggcagggcagaggctgagcagggcagtagtctagaataggttgagcagggaccgaccccctgctaggcatggggcaggcttccagggctaagccccacactgcagtgcaggctgtggaccagtttccctgccccctgccacctgcccaatgcaggagtctctgggccatgccattcccttttggtgagctgggctggatagtgctgctagcctctggcagactggtgggacccacaggagctgtctcaggggctggaccctgcagaatgcagcctgcatgtgcctgaacagctgagattccatgccccacaatttagaaatccatgtagaaaagaattctttatttgagattggtggagaaggatcagaagaccatatttttaaaatcaatgtatatatatgtagtatgtatttattttttacttagttttgcacctacactatacacaggatcaatcaattttaaaaatgaataacacggaaacgagacagatctcaatgaaacccatgtaagattattgatcacatgattcttaatcatgctctctcaggatctcaaactcaccaaaatggacctgcctcctggattccgtggcgaacaggctgtgagagtgtcccttctggttctgctcacaggctacagagggcagcaaacaggacaagaatctgtcttcgactcaagagcagccagagacccttagcagtggagggagaaataggtgtatgggactcaagaccccttgcccaggaagatgagcaggtcctgcaccccagttcctgccatggggtccaataagaggaacttagtgtcagtgatttcttcttctgaagagagggaagggtaaacctagccatggcatgaagccttgggcagagcccaggcctactgagcagcagagccatctcttgggtaaagggcatatggacaccaagagacaagtgagccattgcctggagcctccagaggatggcaggctcatgcctggagccaacacaaggaaaagaagtccacccaagggggtgatcaaggcccaggcagagccaccctgtgattgcagggcacccacctctgcgagcacagcagagggcggagggctgcagctctgtgcgcctgagtgtcagagagctccacacaataagaaggtcacaggtggcgtctgagaaaccaagcaaccttgcagtcacccactcccaggcttctagggaatgttttcccagccagatcctgacagcccgtaacagagcagcagggccatgggccatgctcacacatggcagtttccttgagtcacccagaaagtcctcctccatcctcaatcccagcaacatgatggccttacttctcactaccagccacgctgaatcttcctgaatggatacatttatttaccaaggaaggacagtgttttttcctctctgtgctgagtttgggggaagtttagaatatcccaggaactggagctgagggaaaaggttggcttcagctctttcagagagccggcttggacttctggaaactgaccagcacctggcaggaggtttgaagccatgtgggacacccatggtcatcccaggtttcttcacttgtttctgtgaatactacctttagaaaaccaatacaaaaaacaaaaaacaaacaaacaaacaaaaaaacaaaaaacaaacccaagcactcagggacttagaaagtgagaagactcatcaaagaacaagcgtcaggacctggtcttgtcagtccttccgtgccctcgttctactgaactgcatagccaccaaggtgccggggctgcacgggaaccagacagtcacagttctattgttcagtctccagggcaaaaagagaccagaacctttacatatcctgaacatggaactaagatttgggagtcttgaggctctaagttcagaagggtgaggaacaatggccatgactgaatacttgggaggagaattgctttcatgtgtccccagagatcccatccaccccagttggaagctggggacaccagcactgctccctgactcttagcttagcctcagctgaccccgagcttcccctgcccctccctgtatgggaacccagcactcctggcccagcctgtgtcttgacagtggggagggaggctgaggggcaggcaggaagggcagagccctggcatacctggcagtggaaggagaagctgttaccaggcagggcaaagagcacagggagccccacaggtcttcaagtagcactcgcttgctttccagccactggaaggagctgatgccatgctagagacatggaaattaactcacagcccaccaccttccccccaccacaagacagccccgcctgaaagtaggcatacttaccttaaaaaaaaagctcatatggacaggcaaaggacctggcaaagctaatgcaattttgaaaaacaaggccaggggaggtggctcatgcctgtaatcccagcactttggaagggtgaggtggacagatcacttgaggccagcaattggagactggcctggccaacatggcgaagccctgtctctactaaaaacacaaaaattagctgggcctggtggcacacacctgtaatcacagctacccgggaggctgcatcacttgaccccaggaggcagagattgcagcgagccaagattatgtgctccagcctgggcaacagagcgtgactctgactccaaaaaaaaaaaaagaaaaaaaagaaagaaaacaagaataaagttgcccctatttcaatacttattacacagtggataaagactgtgcccataggcagagggacagacacttcgatcaacaggacagaatggagacccaaattaaagtgcccaaatgatttttgacaaatgtgctcaagcaattcatggggggaaaggtggccgctctgtcacatggaagtagggaaatcgcacatcacaggcacagcaagcaggcaggcagagagagagctcctgacctagactctgaagcctcaccgtgtacaaacattcactcgaggtggatcacacacttcaatgtgaaacgcaaaactggaaaactttagggaaaaggattctaagagaaaagttaggtatctagggctaggtaaagatctttgaaggcttgaccgcaaaagcacgatctgtaaagagaagtggataaattggaagtcatcaaaataactcatgctctatgaaagaccctcttaagaggatgaaatgactaaacacagactgggagtctgatccaggtctcacatccagaacatataaagaaccctcaaaactcttcaataacttgattgggccatgatcagcctcctggcctcccctccctgcctagaagttcccaggctcctgggcgccctcttggaattagagaatctttcggggtccccggagtgactttccttcctgcatgtatgacaggaaggggaacccgggcaggaatttacagacactgtactcgtcctaatggaatgggcatctattgcatgagacacatcacaagccactgcccaacaacagagagactatggcaaggacaagagggacatgctgcatggggcaggttgcaggccagagtgcagccatgctccggggcctcctggggagatggggtgcgcgtccaggtgggagaagtgggctttcaggacaagaggagggatggctttccagggctggggccaattccttcctcatcttccatctctcaattccacattcttcctcctcactcaccacagtcatgggggctgaatttctgaattcctaagactcccctctcccggggaactggtggctgtcctgcccacctctcggatggctcctcccatccctggccacatccacccctggatgcttcttgccctcacacagtcccacagccagccccaaaactgagcgcccacagtgtttagaatcctgcagccgctggccccaggctttgactccacgggctgaggcctttaaggacatcggcaggactgagccaaaggagcgccgcccacccagccagagaacactgatgcagggagatggaaataggatttagttactgagaccttgtttacacaaaaatattctaagagaactcatagatgggagggagtaaaccagtctctgtggcccatggagagaggctcaggacaagtggggtcatggagaggagccgggagcagaggatgaaaagcaggaagtttcaatgtatgtggtttaaatggcctggctcagcaggaccccaggggttccaagtccactcctggtgaggccctgaataactcgtctctgcaggcagcagggagccactgcaggtttgggagggagggagggtcataatgaatagcgggtttgagagattcctagggcgttttcttcctaatctcatgatggggttaggtaaacagcctcagcctcaaccctgctcctgctgctgcctctgccctcagattctgcctctgggtctctaggcagaggtgctgttgccccggagagggtgcttgaccttccaagggttcccgctgctcagaggcacacaatttagcatataattagagcatcgaacagggaatactgtgctagttcctaggaaacatttcctctgggcacagtccaccgcatatgctgcaattgcacccaatggcccatccacaggctttgatatcacagatccattttagaccctttctcacaaaggaatggaaagaaaagaaagttgaatgcaaattaagtacactctgtcacagcctcgctatcagggtttcctggatctacagcacataaacctttcaaacatcacactgactacaaagcagtcatcggaatgatccttttgccaaatattcaaagaaaagaagcgcaaagcatgtacaaaggttccagagggtgcaaagaaagcctttctattgctaggcataaagctatcacaaagcaacagggctgtgagggtccccagaacaaattagtatatacaaaaagactaagttgctcccttccactggagctaggaacaccttgaaaaaaatgaactggggttgaaggcagctgactcaattacatatatctatatctacacacacacacacacacacacacacacacgcacacacacacattttgccagatctaaaatatactacaaagtgtctctactaaagccataatatacagcacagcaatagaccagctgacccatgaagactacaaagtctggaaatatcccagctatgtgtgggaatttgatatatgataaaggcatcatgtcaaatcactgaggaaaagatggacttttaaataaatggtgctgggaaaactagatggccatcctgaaaacaacgagattgggtacacatctcacatgtcacacaagatcaaactccaatcgactggagatttaaatgtggaaactgaaaccatgtaagaaccagaagtgaacatgagtaattctatgaaaacctgggtgtagagaaggcttttatcattatgcttcaaagaatctgatgcactcacagaatgaactagcaaattaatacataaatattaaatgaaacctttctacatggccaaaaacaccataaatgacagcaaaatacaagtaaaatattgggagacaatgtttgcagcagatagaaggttaatctagctaatatttaaaaagtcttgaaattgacagaaaaaaagaaaaatgtgaatacaaatggtccttaaagcatctttgaatatttgcagctcagatgcagagaccctagggaatcctgctgttggccacctgcaggaggaaacgaaaatgagactgctcaggactgcggggtgagccctacagttctccctggacgtggcctgttcagactcaaacccaaccacaccccaggtgtgtagaagcctggtgagggcaggagggggcagcgagggtccacagaaccttcaagtccaccagatgtggcccaccctgagggccgggatcccaacctaggcacttggtggctgaggaaaccatggtgggtgtttggatgactctgcctgggcctgtgtccaaggatgcaaatgaccaccctcagtgattccaccaaggccagggaggcctcgcctcggtcggggagcagcaggtggcaaattggagccctggctgggcaaacaggagccttggctgagttagtgtgacccaggatgagtcaaggctgaatgagttgagtgtccaatcctcttgctggtgggtggggatcacgtcccctcaactggaaacagggcgggctctgagacagctgtgcccactgaagggcggggaaagattcacctgctggtttctggcccaggactgaggacactggcacctttccctgcctgtctcttggggctttcttttcatgatccctgagcctccatggaagaagtccaaccacctgagaccagcaggctggaggccaggtgcaggttctctggaagcaacccttccaaggcacgagtgcggccatccaagtctgaaaccagcccagacaccactgaaaaccatcatgcgtcccaggtggagaccacatagagcagaagaatcttacaggaaagacttgggattcctagaagtattcttggtatgatggtcatacaagaccatagaaagacacacaggtattataatggttgagtttgttccatggaaacagtgggactaattataaatctcattaaaggatatgagcgaagactgaggaccaaactcctgtttaggttaagtgtgtgtacatagatcttctatttacttagaactcttcaggaaatttgcatgagaaatggccaatgactatctcttggaatgagagccagaggtgatgaatggcattttattttgattttacacactcttcactgtatgatcattttatactaaatatgcataataaagataaaatcttctgataattagtcacataaatatgagattcacaatatgagagacaaatacaactaaaaacaaaacagacccaggcaattgcatcatatgtgatccaatcctatcactttaaaattatccaaaggaattatgcacatttgctaagattttaaataatgtgattcttctcagttctctgtaagtgtgacaaattggaagtataacattgatctcacactgaatcttgtataaaaacaatgaactctaatgcaatgatttttatattaaatttacttacataattaaacatatcaaggaattaaagggaggagtattgtcatctggaatcagaagagctcacagccatctccactgttgattgaagatttgagtgaggggtcttagagactgagtcagtgggctggggtctaggcttcactcctttttggatcaggtaactttaactttgtgtctgtttcattgtttatttagcactgctggtacaaacacagaagagcaattgatcctcactggtgttcttcagggacagctggtggtaggtgagggtgagctgggaggaaggtggcattttgggagggaaagagtgtccactccccaagcagtttgattttctggggctgtccctttgacaccaaagatgagcccttactgttcttttctatttctctaagctccttctgagaatcacaggttaagaattttttttgtactagtactaattataataaacttttgattttactgccaatttaaaaaattatatttcatttttctccattcacagtagcaaatctgtgaacagatgctttgcctgtattaatatgctcttgttctatgtattctgctttcatgaatctagttatgcagtatttaatttttgccctttattgattacaaataccatttcaaggaaagcacatttttttgagtcttgaaggagaaaagggctttccacaggtaaggcaggtgggagtgagatcaagttaggatgttgaccaagaatggtttacacagcaaagcagtgcttacaactacaaaggtgcttgcaggcatctgtctggaggtctcctcaatagcaaagctcctatcctgccctttatattaatgcgtttagagcctcactccatttccctggcggcttggactttctcaattttttcacttctggccaccttgtgcagatgtttccagaatggggaatctttaatcctatttctgcccaagttcattcctgggtagttctattatagtttggatatttgtttcctccaaatcgtatgttgaaatttaccctcagtgttggaggtggggcctaacgggggcagatccttcgtgaatggatttaatgccctccctcaggggtgaatgagctcttgagctctattaatctcagggagagctggttgttaaaaagagcctgaacatcccctgtctctcttgcctcctgtctcagcatgtaaacactgcacaggccagcttcccttccccttccaccacaagaagaagccacttgaggtctcaccagaagcagagcagatgccagcatcatgctttcagtgcagcctgcagaccgtgagccaaacagacctcttttctttataaattacccactctcaggtgttcctttatagctacacgaaacagaccaagacaagctcccttcctccatttgtcacaaccgttgagacacttgttttcctggttttgtttgtcttagttgtttttgactttgcctggtcttcttcctcagttgttatctatatttaggagcatgtatttcacagggataaaatattcactaacgaatacttctattttattttcacccacattttaaaaagatacaattctcgcttttgtggtagcaaatgtaagagattttcattactaaatggcattttatacatttttcttataggaattgattgatgtacatatttctaacttcctatatggatcgcttcctcacattttcttaccttaaagaatgacttttgtagttcttgacagatgaaagggcttttctcagagactgtagcaggaagacagagcaggtgtgggggttccttagaaggggagggctgggggggcaagttgcatgacacacctcctcagctggctcctgggaatgaagacaaggggctgtttaactacagacacactcagcaccatgagaaagctaaaacaaacaaacaaaaatctataggcatatcttggagatattgcaggtttggttccaggccaccacaattaagagagtcacacaaattttttggtctcccagtgcatataacattatgtttacattatatggtagtctatgaagtgtgcaatagcatatgtctaaaacagtgtacacaccttagttaaaaatacttcagtgctaaaaaatgctaacaaccctctgagccattagcaagttgtaatcttttggctgcagagccttgcctcagtgttgatggctacttactgatcagggtagtgtggttctgaaggttggggtggctgtggcaatttcttttttcttttcttttttttttttttagagacagggtctggctctgtcaccccagctggagtgcagtggtgcgatgacagctcactgcagcctcaaactcccaggctcaagcgatcctcctgccttagccttccgagtagctgggacaacaggtacatgccatcaggcctggctaatttttaaaattttttttttttttttttttttttttttgtagagatgtggtccttctatgttgcccaagctggtcttgaactcctggcctcaaatgatcctcccattacctgaagtgctgggattacaggtgtagccactgtgcccagcctgtggcaatttcttaaaataagacaatgatgaaatttgccacattgatcgacccttcctttcactaaagatttctctgtagcatgcgatgctgtttgatagcatttgacccaaagaagaacttctttcaaaatttgagtcaatcctcttaaatcctgctgctgctttatcaacaaagtttatgtaatattccaaatcctttgttgtcatttcaaaatgttcacagcatcttcagcagaagcagattctatcacaagaaaccactgcctttgctcatccatcagaagcaactcttcatcagttaatcatgagattgcagcaattcagtcttatcttcaggctctgcttttaattctaagttctcttgcaatttccactacatcagaagtaacctccactgaagtcttgaacccttcaaagtcatccatgcgggatggaatccacttcttccaaactcctgttaatgttgacattttgaccttcttccatgaatcatgaatgtttttaacaaaatctagaacagagactcctttccagtaggttttcaatttactttgcctggatccattagaggaatcactatctatagcagctatagccttatgaaatatatttcttaaatgataaggcctgaaaatctaaaactaccccttgatccacgggctgcagaatggatgtgtgttagcaggcatgaaaacaacattaatctccttctatatctccatcagagcttctgagtgactacgtgcattgtcaataagcagcaatattttgaaaagaatcttttttttctgagcaataggtctcaatcacaggcttaaagtgttcagtaaaccatactgtaaacagatgagctgtcatccaggccctgtcgcattcataaagcacaggcagagttaatttagcttaattcttaagggccctaggattttcacaatggtaaatgagcactggcttcaacataaagtcaccagctgcattagcccctaacaagagagtcagcttgtcctttgaaacttggaagccaggcattgacttgtcctttctagctatgaaagtcctaggtagcatcttgtttcaatagaagactgtttcatctaaattgaaaatgtgttgttcagtgtagccacctttatcaatgatgttatctagatcttctggagaacttgctgcaacttctacattggcacttgctgctttacctggcacttttatgttatggagacagcttctttctttcagtctcatgaacaacctctgttagacttcaacttctcttctgcagcttcctcatctctcagggttcatggaattgaagagagttagggtcttgctctggatgaggctttgacccacagctggttccacacccctaaaactttctccagctcagcaataaggttgctttgctttcttatcattcttgtgttcactgagtagcacttctcatttctttcaaaaacttttttttttgcattcacaacttggctaaatgtttagcacaagaggtcaaacttttggcctatcttggcttccaacatgccttcctcactaagcttaatcattcctagcttttgatttaaagtgagagctgtgtgactcttcctttcccctgatcgcttagaggccattgtagggttattaactggcctaatttcaatattgctgcatctcagggaatagggaggcctgaggagagggagagagatggggaatggcgattgatggagcagtcaacacacaacatttattgattaaatttgccatcttatatggacttggttcatgcctcaattacaataggaacatgaaagatcactgatcacagatcaccataacagaaataacaataatgaaaaagttttaaatattgtgaaaattaccagagtgtgacacagaggcaggaagtgagcacatgctgttggaaaaacaacgacagatttgcttgatgcatgattaccacaaaccttcaatttgtagaaagcacaatatctgcgttaactcctgtttctctggaatagtctcgtaaacttcaggttctttgtcaatgagagactgcttggaggctaagcctgctctgaggggctgcagctaccctgcccctggcagtgtctttgactgcaaggcgtggataaagccggagatttttcgatggagcagaggccagctgggtggttgcactgactcgtgataaccctggtggcagtgctggaggccggtgaggtggtgaagggcatggcgcttcggacatgggcccttcctacgtgcaggacctcctggggtgcagaggctaatttcatcttgtatggatgatgttcctcttcctccgtcaccagataccagattttatcttcagatctggctcccataagagtcatgtcatctgcgctgtttttgattttgttctgagcttcccactgtgccctatggctggtgtttccccagtccatggctgtgattacatctccgatacacaaattagctacagcagccttgcttctgggggtgacctggaaatggagaggatgcttgaagtccttgctccccatgatgcagaagccccatggtcccgggccctgagggactgtctactgggtgatcgtggcatggggacaggcttgcaggacaagaacactggtcataccaagagaacctgctctgaaaattgaattttccacaagcctagctgctgaaaaggcccgttgtaacctgaggaccagtttaagctcatattttctcaaacacactgccctgactcgaagactaaccttacctccagctgtcactcaccagtcagagctcgccagctcccagaagcttctccagagccaatgtgctttctttccaaacaatacctaacatttctctaataaaactctcaccttttttaaaaaaaaacttttattttaggtttgaaggtgcatgttcaggtttgttatcagtttacataggtgaactcgtgtcatgggcatttgttgtacagaattttttcatcacccaggtattaaacccagtacccactagttatcttttctgctcctctccctcctcccaccctccaccctcaagtaagccccattgtgtgttgttcccctctatgtgtccatgtgttgtgatcatttagctcccacttataagtgagaacatgtggtatctggttttctgtttctgcctagtttgctaaggataatggcctcccactccatccatgttcctgaaaaagatgatctcattttttatggctgcatagtgttccatggtgtatatatgccacatgttctttatctaatctgtcattgatggtcatttaagttgattccatgtcttcgctattgtgaacagtgctgcaatgaatatttgtgtgcatgtgtttttaaagtacaatgatttatattcctctgggtatataaattccaaatgggattgctgagtcaaatggtagctctgtttttagctctttgaggaattgccacactgctttcttcaatggttgaactaatttgcactcccaacaacagtgtataagcgttccctttcctccagcatctgtcattttgtgactttttaataataaccattctgacttgtgtgagaagatatctcattgtggttttgttttgcgtttctctaatgatcagtgatattgagcttttttttcatatgcttgttggccatatgtatgtcttcttttgaaaagtgtctcttcatgtcctttgcccagtttttaatggggttgtttttctcttgtaaatttctttaagttccgtagagatgctgaatattatgtctttgtcagatgcatagtttgcaaatattttctcctattctgtaggttttctgtttactttgttgatggcttcttttgctctgcagaggctcttaagtttaattagattccatctgtcaaattttgcttttgttgcaattgcttttggtgtcttcatcatgaaatttttgtccgtttctatgtccaggatggtattgcctaggttgtcttccagggtttttacagttttgggttttgcattttagtctttaatccagcagtccacaacctttttggcaccagggactgactctgtggaagacaatgttcccacagagagcagtaggcagggagatgatttcgggatgaaactgttccacttcagatcatcaggtattagttagattctcaaaaggagtgcacaacctagatccctcacatgtgcatttcacgatagggtttgcactcttatgagaatctaatgctgctgctgatctgatgggaggtggagctcaggtggtaatgcttgcttaccagccactcacctcctgctgcacggcctggtccctaacaagccacagaatggtaccagtccattgcccaggggttggggacctctgctttaatccatcttgagttaatttttgtatatggtgagaggaaggggtccagtttcaatcttctgcatatggctagccagctatcccagcaccatttattgaatagagaatcctttccccagtgcttgtttttgtcaggtttgtcaaagatcagatacttgtaagtacgcggccttatttctgggttctctattctgttccattggtctatatgcctgtttttgtcccggtaccatgctgttttgattactgtagccctgtaatactgtttgaagtcaggtagcgtgatgcctccagctttgttctttctgcttaggattgcccctgggctattctggttccatatgaattttaaaataaaaactctcaactttctctttgttcttggaacacactgaagaccacccgatctgtgagtatgccccactttgccattcttgcctcctaaataatcagtgttaagtttagagagtcatctctatattttatttgacttcagcaatgtaaactgtgagtcagagctgcagtggtggaggctgcaaccttggcagcgggaaggtcagttcacagggtttctcggcatgctcctcctgtgtccccaccgtctataggtgccctccatcatacatgtgcccttggcttgtagactggcctgatctttccagaactatttttggtcatgcctcatgcatgagcttgtgcctgagcacaatgatgtgaaaattaatttagtcatatcttgtccaaactaaaaacattgaaccattttaaaggaaagcagcttcccaatgttgccatatattgttttaaaataattgtaaaaagtagttgctcacgtaacagcactgggcctgccattgaccttgcacgagatgcctcacacacatctgagaggctgttactgtggacgcagtcctcagtgctgctgctgcatgggaccctgcttcagaggagctctgcaacagcaaaagtgccaagcagatcgaagaggacacagcaggaccatgtggggccctcctcccagtggtcagttacatcttttggtatcatggtggaggttgggggtgcccctgagcttcctgtgcccccttcccatgcccactgtacccaccatgacaagctgagcatgtttctgtagccatcctctaccctgagtagatactctgcatttttactgtgcaatgctttcaggactgtgcctctgtggtcacccctgtcgtccagctccgttatggccatgggaaccagaacctggcatgttccagcacctcattctgcagttagaaatcaacaaaacctcccaaatgggagaggagggcctaaaacccttgggaaatttcctttgcgagattttcatgagacttggaatgtcctgaagtttaatatgtgaaggtatttgaatgacacatagaactccgtgtaagacaggtgtagccaaaagagaaaaccattcatgtcaacagtctccctcgtgctctttcagagaccctctgaattatagcacccagaggccctggatgtcttgggagcggatgagccccatgcacaggcaggagagtggcgcattctctgggtaacgaagtatcctatagctagaagattagaaacaattctacatgaaacatttgaaagtatcttttgatcagtttatttatttctgaagacatagatttcctttgggaaacagtagcccagagaaaggtctccacaaccaaaaagcactgtgaattgttagttgcattttgcctggtcacgtgagtgaatttcctcctggattgcattgaatctgcactgttttggagactggcagatccgtcgttgataaagccacatgtgcagggtcatcatcagttgatgtacttccatcctagctgatactgttgatttttccctgccaggaagcttcctgacacagcctgcaccccagtggacttcccaaagcaagttgagtctgacttcgcacccctgacatcagaatcatctgacttctgggcacgccactgaatactgatgtacctgaaggaaccctgggtaccaaacatgctcaagtgaatgaatggtgtccaggacaaagcccagcaggtgtccagacaatggcctcccaccagagatcttgtcagcacgccgctctgagcactgtgtgccttagtgtctttgtgtcctggttgcaatgaagtctttctccataatgtcagtttttatactttttgacctagtaggacatcagatgatgaattttcatgtgatatgaattcagcctaggtatgtcttaggattggtttagagggaagactgaagcaggtgaaatggcaaccccttgaatacacatctgtaataaattgaaaaatattcatcatgatttaatggtatcttttaaaataggaaacaaaatatttcctgttcattagaatcgttacatcaactaaagtcatcataactaaaatcatcattacatcaactaaaatacaaaatatggaatctaatctgatcttcagcagatgttggcatttctttaagtacacatcttcacttctgcagtgcactaacagagactcaagaatgacaaagggaaaaaaaaggcaaaattaggaaaaagggagacattttgtagttgatgttggatacactggatggactatccatttgatataccttctcattgatagaataggagacttcaggtttcacaaaggcaaatcgtgtttcatgagaaaaagcaacagaaaaatatcgataataaaaatattttagtgttttatgaagaactgtatgtagcttgaatctttaattaaataagtgttttcttttgcatgtaaaatagaattcagcctttcctaactcaggacagcaatgggctgaagacactgctgggcccatcctgccacctgctgggaggccttgttccctcaaaagccttggtttggaaggatgattggaaaatagctttacacacccaccctttattgtgtttttattcacaaagccttaatataccgccatacttcatgtagttgatttttcacatctctgataagtttttaaatgtcagtattcctactaaagtctctctctctgtcctgtgttctatgttctagggtgtatgaagaaagggcttcagcagaaacagaggctgaagcctgcgtgctgggggccgagaggccagaggagaatgtgatgagacatagaattggtagtgcaggaagttggaagatcaagtaccgtgatgttggtgctggctgcttgtgttaaactgcctaggttttaatctacggtaattttcgcccacctgtggggctcccctggtgccccagctgtgatggggtaactgaactgccaccagggccaagctgtcagtggcccaggatctggcgcttggaagagttctgagaagcacccctggatcaaatgaggagaaacagacttcatccatacctattcccattgtatttaaagaagtgaatattctcagggatttccacagttttaaaagtgtctttcaattaaaacatttaaaataaaataaggttgaggtaacaaccaagttacacttcttccagcagcacccagacagcgagagccctcagattttagaattttagaagagaagattgtggccatgtctggaattcaaagaagaaccagtgagaagagctagatagaactgatggatgctgaaacatctaatattaaaatagaagggcaaccctaaatgataatataaaattacaatattaatggtagagtaattaaggaagccattaatgttgaattatgtatgtgtatgttaaacctataaattaaaatatcatgaacattataccatctgtgctggtttcagtaatgctgttataaaataattattaaactgtatgaatgactttttattaatataaaattataaattgctattgtcaaatagaactttaaatttgaataaaaagaatatattattactaatatgttagactttgataaaatatgaaatttaaacaacattttaataaaatgctaagtttcccagtaatatttatatgaagttatttgagatactgtttgttcaacaaataatgtgacagtgtctagtgttggcactgtttgattaagtggtggaaaaataaaacatttgcaaggaaatgggttatttcaagttatattttaatgtccttttatttccacataataaaatctttatgctgggcatggtgactcatgcctgtaatcccagcattttgggaggctgaggcgagaggatcgcttgagcccagaagttcacgactagcttgggcaacataatgagactctgtgtctaccaaacaataaaaaataaaaaattacccgggcctggtggtgcgtgtctgtggtcccagttacacaggaggctgaaggaggactgcttaagcccaggaggcagaggctgtagtgagccatgatcctgccgctgcactccagcctgggcaacagaacaagatcttatgtcaacaataaaatgaaaccaaaaagtaaaatcattattattcacttgatattcgtgaagaaattgtcaatattgattaatatcctcatctgaattttaagtgattcatataatggcagactgtaaatatattacttagagataaagaggactttatttaaatattcaagttattgtcaactagactattttaatgtaaatcttgtggctcatgtcatatgttattaatattaactttaatttttataataattgtgtgcatttcaatgtatgcatttcattttaggtaattttgcaattttttatttttatttttatctttttagagatgatggctcactatattgcccaggctggtcttgaactcccaggctcaagcgatactcctaccgcagtctcccaaagtgctgctgcgaatacaggcgtgagccactgcgcccggctccgattttgcaattttaattgttctgcaaaagtttcctctgaatattcatcattctgcagtgtgtgaatgaacacagcctgaaatgttgagagacttgagatagagtttaaaatatggtgattttattcctcgtgtgtcttccaggtgagaatccacacgttatcacatgaaccagtgatgtgtgtcataaggaaattaagaaacaaacctatactatttttgctacccttattctctggaaaatgaactgtaatagatttctagaattaatttttgatgctaaaaatattatcattccaattcaatagtgagaacagcgccgcgttctgtgctacgctagggggagcacccactttggtaatgaacatcgttccctgttcgtctttagtgaattaagggccggatgaggaagtgggaaataggaggaagctgtgcctccccggaggagcacgtgccctcagagccataaggcaggagcagaggctgcctgagtttgcagcgcgaggccagggggcttccctgggactcggcgaccgccctgtgcgctcggacgcgcaggcaaatccccgctccgctgcgcctggtgtgcacggagccctcctacttgcttcctacgccgcttatccgtttatctgcatcgtaaaagccagcgttactttgttttcgtttcaactacttttccagtgccacgggatttcatgcaaagtgccttagacggtagaaatgcctactcctctcgtttccttattcctggaatgcgctcacatgcggccacgtagggacctgggacgctcagccctttctgcgcccttgccctctccggggcggcatctggcaaggagggcggcccaacaccgcaagcctgatcccaggggctgacctctggacggtctcagggactgactagggatgcggccgcgggagggggcagccgagcggggagaggactgggggaggggcgcggggtgtgctcttggggtagggcggggcaagggtggcttcgggagggactgggagggggcggccctaagagagcggttgggctccctggctgcctgtacactggtgcttttttctttgctaacgccctggatgtcaccagcccagtttgctcatctcgccggcagccccactgtggttccgttattttctgagagattttcccttcctttctctttttgccctagaccagaactgcgagcagacacccctagcaccccggaagatgggctatggtctccggccacctcctgcccgtttctcattaaagcttgagaaggaggagggtggctgtgtcccaggagctgggttggcaccctcagtgaggttgtggggctctcgtggagaacacaaaccatccctcaggacagcagcagcaggcaagaccccagatggtcctgatcaagacaaagacaagccactccagcatcctgtctgaatacagacagatgggagcatctctcaggccaggagtgccagccgtgtcccctcccagcccacatggtgactgctgctttggccttggtgacagcctgtcctgcccttgtcaggcctcccgggggatgaggtttatgaagcttccagtgtatacctacctcctcctgcttcctgacagtgctcaactcagagccagccccctctcccgttagtccacccctggccagctggcacacacacacagcctgcggcaaggctcttccaagcctctcactgcaccctccacagcgccatggcatattcttgcagaatggaacagtaaatccagctgtagtttaacaacaggtgtgtctctggtaggcacactaggcagcggctcattggcctgtatttaaaatatgaacatgtgcatgactgcaaaggcctagatcctcactttttcctacaaaccagaattgctgttctcaaagtttaaaccacatttgcaatacatgagatcgatccacagcctgagtggaaggagccacatgcaggggatagggggccaggccacccttgggcagagaatgtgggtgcatggagagggtgtgtggggcaggaaggatccctgagtgtttcgagcaaagagtgtgtgatcctgcctgcccttggtgccgtccactggggctggtcagtgaggccgagtccatcatggtggtggggacacatggcaaaactagaagccctgggggagctgggggaagggagcaggcacccattatgctgccgttgcagttttctataagttctataattatttcaaaataaaatattttaaaatgaccatgtccctaaaggagggataatagtaagcctcacaatagagattagtctgtactcagacccacttcagctccagctgtgaagcttcttctgctctccgattccagagcctgatggtgttaaggaggcccctgtggatgttacagcgatgtggatgttatgctacagacatcacagtaatgacactttggagtctcgggtgatttccccattctgtgcaggcggcaggattttccatttcccttttcccacatgagcccttcccctactgggtatcttgagactgaccaccctttgccccaggctggaagccacagagaaggccatctacttgggtttctcccttccatggagcctccctgcttctgttcatcacctgggtccctctcaaagaccacagaagctgctctcaggtctaattttccatcttgattgtgccaacagtgagtttcacacatgtatgtttcaggcagagagacgcttgcacagagtgtggggatacccttggtggctctttcccctccgggattcttccttctttcttcttcttcctcctcttctccctcccctcctctccttctccctccctcccctcccctcttctccttctctctctcccttccctcccctctccctctcttcccctccccctccccttcctatttgtcacccaggctgaagtagcgaaatgacagctcactgcagccttgaactcctggcctcaagtaatccacccgcctcagcctcatgagtagctgtgactacaggtgtgcgccaccactcccggctacatttttattttttgtagagatggaaccttgctctgttgcccagggtggcctcagtccctctgggatgctactggggagttacagtgtctctggggcacaagggattgacttgatcatgactgccattccccagatggtgacccaggtgcttgagaagctcatgcctttccgggcccatctcagaggcagtggggatgatcatcaagggtcttccttgtgactgatggggagcagccattcaggggccctggtgggggccctggcagggcacggcctgccacaccattccaaaggttcagattgtgacctgcacactgcaggtgtcccttgtccatccctacagggaagagtatggccatctccattaggcagtgccttgggtgtccagatggcttccaggggtgacactgcaggtctgagagaacttggattggagaaaggaactggagggatggagcaagattgggctcataggctcagcatccccagggagctgtggtgacatgagcccaagtgggaataggtgtctctgccgctgtgggagtcccaagttggtgcctggggagggcagggctgaggggttgctgggaggtgagtgttgagaggcctaggaggccacgtccatgaatgggtctggagacctggggggctgggtctgagggaacgggagcaggtataaccgagggagctggtgggaggactccagcccagctgttcaggggagccctgagtcactttgggggtgtgaggagagtggaggaagtggatggtcctggtgcctcaggtgagggggcgggctgcagggggccagccttgtgaaatgcagatcaacttggaggtgagctcgggagcatgcaggtgaggacccaagagaccggggggtgctggggcaggtggggcagagagaccaaagactgaggcccagcaggacctggggtagagaagagagggtatagggaggaaaaagggggcagcttcaccaactcatcaactaagggatggttggggtgggccaggagctaagcagggggtggggtgatgggggagatggagccctcacggggcagcggggccctgggcactggtttatgtatgaacaggtgggcaagtcctctagagtcgtggaaagtaaacatgaaacccacaactgcacacacgtcgtccctcgtttttgtcatggcgttaatctccaagtggctttggttcttccccaggcacagaatgaagcgacccaggtcatcactgtcctggagctgcccctgcctactttgacttttcttcttggcctgtatctatgtctgacacacaccagttagtttacgtgtaggtccatatgtttattgcggcactattcacaatagcaaagacttggaaccaacccaaatgtccatcaataacagagtagattaagaaaatgtggcatatatacaccacggaatactatgcagccataaaaaagatgaattcatgtccattgcagggacatggattaaactggaaaccatctttctcagcaaactatcacaaggacagaaaaccaaacaccgcatgttctcactcataagtgggaactgaacaatgagaacacttggacacagggcggggaacatcacacaccagggccagtaggggaggtgggggagtgggggagggaaagcattaggagaaatacctaatgtaaatgacgagtttatgggtgcagcaagccaacatggcacatgtatacctatgtaacaaacctgcacgttgtgcacctgtaccctagaacttaaagtatacaaaaaaaatttacctgtagatcaagccagggatgtgaactctgggccggtcctgcactgagcgactccttgatcctggaccaggtctcctcccgcaggcgcctggccccgcccctcccctcagtcgccgggccccgcccctccccgcaggcgcctggccctgcccggcccggtcccgcccacatcagaaagctcagagcaggctgcgggcagttcccgggttagtcagcagggggcgcgtgaggcggcctggcctggcggctccagctgaaatcagcacagcaggagggagggtgacagtgccctcctatgcaggtcaaactactaacaaatgatgtggctggagaatacttgacagcacgatgactaaacacgtcagtataaaatgagatcatgaagcatgctgtgcccagctctgcggttagttcacagtattttacaaagcgtcgtttccaaacgctcaggaaacaccagctacctataataacgcgtgacacgcaccttcttcaacactcagcacagctctgcaataatggcccagcctgatcttcacgttggaggtgaggacacaggccctggaggattcaagtggcaaggtcacagaagtggtcacaggggaccacagccccccctgcctggactgccctaggctctggatctgtaacccctggcttgctccccattcgcctgcctgaccacagctccgaggcctctgaaaagcctggcaaggtgagcggaaggtccctgtggtgtcgcccccagggcagggatgggccatggagcttagttgagggggaggagctggtacctgctggaggaagcgcagccctggagagggtgcctctctgccctcaccccggtggtgtggagttggagagccttgactgcgggggctggggaaggtgggcaggcccagggcagtgggggagccgcctgctcagcaggagggccagagggaggagtgagctgtgtgcagggatggtgggcagcaggcaggggcaggcacaggaagtagggcgctgagctgaggtggtccaactcaggagctggggaggaagggagcatggaggggagatgggggaaactgggcaggtgcagagagggagggcggggaactgaggagaagacagagcaggggaagtgagggaaggggaagaaagcacaggagcagagggagactggaaaggaaacccggatggctctcagggcagggaagaaggaggggatgggagctgagggacatggagccaactgagatgacgtagggagggcggggatggctgggagggatggccttagcaggagagggcaggggactgcgggagggtggagaggtcaacagaggctgaaggaaagggggaggggagcatgttggaggagatggaactggagagcgaagaagggaagggcatgaatgaaggggagggaggcgggagaggtcaggtgcatccaagggaggtgaggagaggggaagggaggtaaactgaggcagggacatggacagaggggatgggaagtgagtttatcaggggagtcagagtgaggagaggaagggaaggactggaatggagggtgaagatggagtgtgagtggaggtgaagtggggaagggggaaccagtaggggctttgcatgggaggggacatgagtgagggagaggagggaggtacaaagaactggggaaagggagtaagatagaggccacaggggctcaggaggaaggggaggtcccagaatggagggaagaatcttggaagagctgcagtgggtctgtgtgtgtgtgtggcggggagcaggagggaacatgtgcctgagactgtgctgcttcttgaagaggtgacagagacaacacccttaacagagcatttttcctccccatcagcccggtcacctggtcaccctatgaccccacaccctgcagctgcactgagcttcactgaccttgggtggggatgcctcctgagggctctttctgttgttctcgcatctctccagccacatattaaagtgactcagaccattttgacgaccctccattccatgttgtaggtgacactggttatccatgtccaaatctcttcttccccagccgtttggtgtttggtggattagaacagcccatgtctgaaaccctagtcagggagttcactacttttgacatcacgaagaaaaatgttgccaaagactgaaaaataaccataccctgttgctggatctctcttgcctcatccctttacctaataagcaggagttggttacatccttagttcataaccaaagacacttagagagaaacaccgactgtatttgcacaaactttgagaatcgatccatagaaaaacgcagagatcaagatttctaactcgtagggaaaaaacttctgtttttctagcaatgataagacatttcaattttaaattttctcctgtgtacatataattaaaattaatgtcatgtagaaagcacgcagcactgaatttctgggaccgctaaatcacatttggtgccacttgccttatattttcatgacaacatacacagacacctccattatctgtaaacccaaccgttcacacatctgaacagggaagaagcctcctttactctaagaagctcacccctagctctccatgcctggatggcagatgctcgtggggctgttgtgtttggcttcgaggtccatggactccaaggatgttacagatttttagtctctggtctccactgttggttatgctatgagattttactatggacccaatggactgcttctctaggggcacactcctcggtgcttttggaatcgcccatgtccccagagaatccatgtcttgggtatttcctatccatggtccagtcgtcctggaagactgcagagcctcctcaccatggccccatgcggggatgccaggagagggcacttgcctccgtgctccaaatcctgaaatctacttttgcactgatgctttttccctttccagcactgtatcccgtgtctttgacatccctatggcagctgggtgagatgtgtcatcagtcacaggtgcactgggaatgatgctgacttgccagctctagagggtcgtcagaggtggattctgggtcaacacccttttcaggtggaaggaattgttcttcacttttcaaatcttattcaggtatatcaggatctttttattgtgaactttgactttttcttattttgagtggcttaaaatattactattttaaagaaactatggataattttcactttcttgcccaagataaagataattctatgaagcaatgaaagatccaacagtgttaataatagataccaataacagttaagatactgtgctgttcactaaaaaagatgggcatggaggtcaaaggaaatagcatttgtctgggaaacaaagaattgcaactcaggtacagtgagtcagggcagccctgaagagtgtcctgtaaggcaagcacaggaaacatttttgaatcgaggatttccacaaaaagttatttttaaaggcagttgatttgttgggcaggaatcctaagttgcaaactcgttctgattcgtcagttaacgaggctactcccagctgaaagatgctgaaggctggtggacactggcttcagttgtttatccaagtctactggaacattctgtggcttgacctttagcggatgtgagtgcctctcctgcttccattttagaaagccggaggcttagttaattcatttttttcacagtataaatatgcaaagtttaaagagttgatggagccatatatgaaagacatttattattaagcatgaaatttataatattttaatcattaaattgtatatgttcacataatcagaagtaaaatatctaacgattaaaattcccaacagattaaaagtgcccaacagataccaggatatcagatagctcagccttaattttcatctgtatcttcagctgtaacatagatcaaaagggctaagaaatgaaaaaagttggtgtcatgtttgctctcctcctgctatgtcttctcatgcatgttctaaacagtaaaagcactagaatgttttaaagaagggcaaagatacagaaaaaaatcaatatcctataataggtaatgagcacagcatgtttaacagacaattctgtaacttacattaaacacatcagctaagcagttactatgaaattccaatacacggataaagaatatgaacaaggaaaggactgggtgacttcccaaacatctccagtaaacacataggaggaatccagagacgcactacatccaatccagtcactgtgctaggtggctacgttctatttggcacatgtttataaatgtgctgtctcaacattatactaaaattattttaatttgtagaatgatgggatatttttgacatcttgcctatgaacattcaagtattggtcccacaaatatttttagtactcatcttgccattatacacaatcgatgagatccatgcttagccacacagcacgaatggagtagtatgtaccttccctagccttgatttcattctatgtataaaaaaagatgatttattacatgccatgatgcttcccaataatagtagtgaaaatttatgaacaatttactcattatcttaacactgcatgtgaggtaataaatgaccagcttcaatagttaagtggatgtaacatgtacaaaaatgagtatcttatcacactgaatatttagcttaaaatttagaaaatagtcataagtgactatactgtagttatcactacagagaatctaaactccttttgaggtgtaacatttgttttcctttcataatacttcaaatcaatgaacctaaaacatgttactatgcctggagttccagaacacttcagctcccagtgatcgtcaatagtatctacacactaagctctttaaaaactgagttccgactctatcacaagagggggtctgcaggctcagcctggggagagtctgtgaatgaaggatgtttttgctacacccatagcacataggagcgccttctaggtgttcaggattgtcctaacagttggaaacagcgccgtgtggggcttggaaactatgagctgcgcctctgggcctgggatcctgacgtctaaatgaagttgaactggaaggctgctagatcctcttctagctatgcctccttatgcagctgttgtgaaaatgggatggcttcatgggcgtaaaacactttgcacagtagttagtgcccaacagatatcaggagccactattatcattattatcccaaaccatcttcagccacccagggtgagtgaaggttcacaccagggctgtccaggaacgtgcagggtggtcattggttagagaatatcaggaactggttagatccagggctggggtaagagagggaggaacagatggctgcatttgttttctgctgctatgtaaccaattgccacacaagcagcagcttcagaaaccttcctggaggccctccgcacagcggcaccgcggcacagcggcacagcacaggaggaggcctcttcagggcctgcaggagactgtctgccttgcatcacgctgaccccctctgcttctgacctccagcccactttttttttcttttttcttttcttttattttttttgagacagggtcttgctctgttgcccgggctggagtgcagtggtgcaatcacagctcactgcagcctcaacctccctgagctcaggtgattctcccacgtcagcctcccatgtagctgggactataggcgtgcaaccaccactcccgtctaatttttgtattttttgtagagatggggtcaagtgatcctgggcacaagtgaacctcctgccttggcctctcaaagtgctaagattacaggcgtgagccaccacacccagcctccagcccttctttgaaagggctcacctgattaggccaggcctctccaggaaaatctcctttttgatgaccttacagtagactgattaggggttgtaattacatcttcaaaccccactaactgcaacgtaaagtcatgtaacttggggagtgagatcccaaagtattcagaggtccaggccaccctggcaaagtggattctatatacagggctgttccccagggggcagaatcttgagggccagtttaagattctccctcccactcagcctgaggtgctaaggtgcaggtaagaacagctcagctgagacagaaagcacaggagggaagagacaagatccaggcaggccccgagttcagggcagggctgggctgtgtgcccacagggcctgtgagaacctcacaaggaagtggggccacagatgggcaccccagctcttcaccccacttcctccctgcgttggccatgtggccatgggatcctctagactatgaacctcttctctgaaaacatgactaaggtgccacaaaatcaggctcctagaggcgcccggcagtgactgatttgctgagcttcccctcctccctttttctccctcatgcctccatgtcttgcttcccccggcccccacttcccccagctgtttagttgatcttttcctggcccgacctcgacaccccttatctcatggccctgtcacgcccatgtcccttgtcacctcacttccgtgccttatttcctctgaacggggtttgtcccttgaacggtggcccatggcccccaccccctcactgtttccttgtccctaccccccaaaacgttggactcagttctggggggactagatcccctgctcctcacccagactcaccagggccctttgacctctccacgtctctcttcccagccccctctttagtcaaggcctacccgagacctctggacgcggccctggccctgcgctcagcgtctcccagggtccctgctcccaagtccccgctcccccgcagcctggacgcctccccaggctctgccatcgctcggcggcctcgctgccccaagtcttcgtggctcagcactctctgcaccccgcaaccccagccttccaccacttctccgagcgcgtacccgcctccccgcctgccagactgaggaacgccgagcctgcaggtgggaaacagaaccggatgcgcgccttaacagttgtccgtttagcaggaggttttgagctcccgcgagcttcttcctaaattccagccacgcgaaatttcctgccgggcggcttgttcccagttcccgctgcccgggcccctgcctcctcccgctcagggctccgcgtggagagagggtcgttccgcactcgccccaggggccggcgggcggctggggattccagccgcttcaccccgctccaggcagctaaaagccactgtggggggaggtgggggatgaaacctccaggagcaggaaggagcaggaggggcccacccggctgcacggggtagaacctgacactccgtacaccagcgagtggaaacacgacttaggaaactgacagacaacattttcaaggttgaaataagaggaaaaatagagtagatctgggatatcagggaggaaagcggagggaaacggtccaagggcaagggtcagggcagaggctgcaacgggaaactctgacgcccaggagggcaggaacatataggaagggagactgatatgtgtgaggaatatgacctcgaaggaaccggtcaccagcagcccccatgctacctgaaaacaccgttcctggaactccgcaccgcgctcactaagaccctgctccctccatggcagggtcctcccaggagcacaccggtctgccgctcacctggactcaggccccagggaggaccttccctgccctccacagcccggcccttgctcctgctgggaaatcatctctgactggcagagttcctgctctgcagtgaaactacagggatttgaatcctatgctgagaaccaagcataggcctcaggttcagggcaggctcctgaggaagaatgaggtgggtctccaagggctgccggggtagagcaccctgaccctgaggacgccagtgtccctcacaggacaggagggagccctgaccccaaggacaccagcgtccctcacaggacagaagggagtcctgcttcggatccccaggcagtgggagctcatgttgctggtttgcatggccaggctcagagcagagtgaaggaagattccacagctggctgacctttattttcataataatccaatcaatgaaagctctaccagcacaatgtcagtcttgcatggaaaaggcaagggccagttatttttcctgctatgctctcaaacgctagcttcgtgctcagaacagagttgttgcttggtaaaaatttaatctagtgatttatttttttaagatagccacagtgttctgggtgttggagatctagcagccagaaaggcaggacattgcaatgggaagatgatgctctggtcggtgacaagccagatgtagagacattaacaagcttccttcaggtagtccttcgtgctgtgaaagaaccagtgtgactgagggctgagaggaggggtgtggccaggctgtcctggacacatgttcaaaaaataaatcatcgttattcacgataacaaagacagggaaccaacctagctgcccttcaatggtgaactggctacggaaaatgtgtacatatacaccatggaataccatacagtcataaaaagaacgagatcacgtgctttgcagcaacatggatgcagctgcagtccattatcctaagtgaattaacgcaggaacagaaaaccaaataccgcatgttctcacttacaagtgggaggtaaatgttgagtacacatgggcataaagatgggaacaatagacactggggaattcaagagggggaaggaagagaagaagcggggaagggttaaaaaactaaacattgggtaccatgcacactcgttacttgaatgactatatcaatcgtaccccaaacctcagcatcacacgatatgcccatgtaacaaacctgcacatggaccccctgaatcgaaaagaaaagttgaaattattaaagataaatgaataaatcaatcagtgctgacagactcacccactaggcccaggggaccattgttctccaggatggcatctctgggctgggcctcacagggcccactgttcctgggtggcatccacagtaatgtcctcaaaggttactgatacctaaaacatctgaaacattctgggccagccaggaccttcccttccaagggtcaggggaggacaattgacttcccagcaccaaggaaaggtctatgtgtagaggggctcaaaccatgctgggattccaggtggatgtctctgtgcccatctggcatgtgcctcacatccactcagagatatgtgcgcacgctgagcacacaaccaccttatcataaatggatatcacatgagctctggtgtgaggtcacctggacagttcccagtaagatggtaattcagactaccagatggcgatggtaagttttgggaatacatatctaaactcccctccttaacaatttaaagtcaatctacacactcatcccaaggcaagccatctccacaacctgtggcctatcagctgtgactctgggtgaactattccctcataagaacctcaggttcctcctccgtgaaatggttcaacaacctgttgggagagttgagagatccaatggactaatgcgtgaggggcctgctggagagcgaagctgaacaaatccatgtgaacagtcccttatggagtgacacagagcgatgaagcaacgcccagcgctccacaggcctgggctggcaggtgcagcttccctcatcccacacaatcctgtgtgtgcggggctaaggacagagttcagagcagaagcccaggctgcactgcagggcggctcatgcagacccctcctgcaatggggcctccgttctcagtgtcctgtgggacctcgaagcatcagtcaccattgctgctcttgcgtctttgtcctgtgtatctgctaatgggtgagatagaagcctcactaccaaatctggtctctccagtccttcaaaattgccacagaacgctacattttgctccatctactacactccttctcctctagaaacgtcaaaattaaggaaataaagctctccatacatcattttcagttttcaaatttgatcaaaggataattaccaagaaagaattgagtttgaagggcaaggattgtaaggagagttttatttaccttttgaaatgatcagactgttagttctatcctatcaacatttttgtaggtttaacactggggagcatacgtcagtgattcctcctagccctctctcacccaacccgctcttctgctgtccctgaaggctgccctgccctcctccacgcatctggagtgcaggctgacaggactcccctgaggacacacctgccgccaactgcaaggtgagcgtttcacacagccccaattcccgtggtcacttcatgctcaggcccatgatagccactgatatgggcgatcccttgctggggctgtgggctagatgagaaaaagaaacctctcccatctcttctgagaagacacaggcttcatggaagttggaactcatagagggaaaggttggaaaggagatgatctcccaatcagcccctgagctgccacagcctcccagagtcctggagaaacaactggcactaagacttcttggacacatttagaagatccaggatgaggaacaatgtgcccatctgctggctaaagaggtaccattcaggagaagaggcaggtccttactcactgcaggtgggctgtggagaactcaaccaccacctgcgttcatccagattctccccctgggatagtccataatgatgcaggcaaagtggagcagagacaaagaagccacaggacaacagtgcttctctctgctctgctcccaggctcacctgccatgaatcctgcccctgccccctcttgtggtctccctggtcaacctgcatgcactgcagggaggtccaagctcttgcaagtggaaaggctttggctatggctcccatcaggaagacgtttatgtctccatgtgatcggcagtaaaatggaaatatagggttttattattaattagccctagtgttcaggagtgccatttaattccccccaccgagggcaattcccaggagaacctgactcatctcgcatgaggattcttgtctccctatcaaaagacgccatctgaaatccccgatgtagttattttgggttagctgcactagtgtcggttctccaacatccgccccagcactttcctgcccccgccctctgcatgcacccacctcagtcatcttgacccctccacctgagggatcagggagcatcagctcttcagctccccctctgtcccccatgcccttggacgtgtggccgcgctatgttggaatctattcagtggcaggggagacaatttaatgactcaccccacattggaggtgttgggagcaagccctcccaaaatctggccataaattggccccaaaactggccataaacaaaatctctgcagcactgtaacatgttcataatggccctgatgcccacactggaaggttgtgggtttacgggaatgagggcaaggaacacctggcctgaccagggtgggaaaaccgcttaaaggcattcttaagccacaaacaatagcctgagcgatctgtgccttaaggacatgctcctgctgcagttaactagcccaatctattcctttaattcggcccatcccttcatttctcataagggatacttttagttaatttaatgtctatagagaatgctaatgactggtttgctgttaataaatacatgggtaaatctctgttcagggctctcggctctgaaggctgtgagacccctgatttcccacttcacacctctatgtttctgtgtgtgtgtctctaattcctctagcgccactgggttagggtctccccgaccgagctggtcccagcaggagggttcagcgattctcatcacacaaacttagcactaaaaaccccaacacataatgtgtcataatgcttctgctctgtccacaatccccactgggcagacaggctcactgagtgcagatgaaggagttgaatttagttgactttttgggattttttgttgaaagggcagctggagctctgtcctagtaaggagcagcaagaacatcctagcatctcataatgtatgtatatgaaggcatctgtgagcccgacagcaccccctaaatgggggttcagaattaaatgcactgcatggacacacattgatcatgtgttgttgaacgtcagtgggactacaacccttggaccctgaggttcctaaaaaaggaaaaatctagttgcagcaattgggatgctgtgacctaaaccaaggtgtcaattcttttcttctgcctgatcaaatgcagtggtgagccttccaatgaattttgattgcattattgtacttttcaacttctgaatttctttttataattcctgtctctttgttaatattctctatttggtgagatactgtttttgtcctcaccgtagttctttagaacatggtttcttgtagctctttggacatacttaaaagagctgattttaggccaggcatggtggttcatgcctgtaatcctagcactttgggaggccaaggcaggcagaatgccagagcttaggagttcgagatcatcctgggcaacatggtgaaaccccgtctttactaaaatacaaaaaaattagctgggcatggtggtgggcacctgtagttccggccacttgggaggctgaggcatgagaattgcttgaacttgggaggtagaggttgcagtgagccgagagtgtgccacagcactccagcctgagtgacagagtgagactgtctcaaaaaataagctgattttaaacctttgcttagtgattccaaatgtctggctttctcagaggcagtttctattgatcgcttctttctcctgtgtgagggccattctctcttttctttggcattcctcctacatttttgttgaacagtggacattttgcatattataacatggaaactcaaaattctctgctctcccgggggtttgttgttgtgcttattgtagttgtttgtttagtatattttctgaactaattttaaagtttatattctttgaagtctctgttccattagtttagtggtcagctaacagctagacagatatttccttaaatactgggattcaaaaaaatctaatcttggccaggcgcagtggcttttgtctgtaatgccagcactttgggaggctgaggcgggtggatcacttgaggtcaggagttcatgaccagctgggcaacatggtgaaaccctgtctctacaaaaaattcaaaaattagctgagtatggtggcacacaactgtattcccagctgctgaggtgggagaatcacttgagcccaagagtttgaggctgcagtgagctataatcatgttactgtactccagcctcggtgacagagcgagactcttctaaaaaaataaataaataaaataaaataaaataaaaatctaatctttgcagagggagtctttgcattttgaggtcattccttcaatgctcagccaggtggtttccaacctggccttaaccatcacttcctgcctgtgttgaacctcatgatcagccaagggtgagcttagagctgtctgagctcttctctgagggtgcacagagccctgggcatgtgtgcggccttcaagattcccaggaatttgtaacaattttccaaagcccttgttgcctaaaacatcttattcccagatttttctcccagtaggttttggttaacctattgtttgccccagcaatcgtccattctgtttggcagttgagcctggaacatttgctgtacatgttgtcaacaattgccctgaggtgggtgcttcagtttggggtgagttccaaggtggatgagagaatggcaatcctttggagccagccttctgggaagcaatctgacagatcaaaatgagcagttccaactctctgagaatatcttcatttctgatctctgcagtaccgcactgggaacagcagctgtgagttttcaagggaagcaggagatggaaccaggataagctaaagaccccagagcaagcttttcttattggtgtcatcagtttttcttggatatgtgctctactggttgctgcaaactttttattagtttccagagctctataaagagtgattttgaccattttttgccagtggtttcactgttttggtggaaggcaggcctttggaattcctaactcagaactttcccatggatggttttaaataaattagttttcagatctttaacttctacatgggctgtttccaaaacatgaccttcctaagaactagcatgagatcaaagagtccctgtttagaatagcccttctcccacatcacaaaaggttccttttcaacaaccttgcatcttactatagaccgtagatccatatctccagggatgaacaaggggataatttaaaatactgaagtaggtatttcgggtgagactgtctttaattcctgggtatcaaatcccactacaagtcatgtaactttcaattcttttaaacaagttgaaggtggaacgaatccagttgtcagcagatgggttatttactataatttttattatatataactgtgctttttggtctataactttgaaggagttcaaataattgtgtaaagactctttccattcctatctacttatttatgtaagcaaggtttctcaaggcttccaactgaacaagtgaaaaaataggtgtatgactgatgttgaactctgtcacattctggcaggtaactgttcattcacagattcatggcaaagctgggacagaagtccatctgtctcattaagagaaacattccaacaatttttaatttttaatttttatatttgctaatcatttaccaaaatttatggtgtagccatgttttatttggtttttgtattatattattttgaagaataattctaatgaaaactgaatccatcttaagtgataacaaagcctttggtaacgtcatcacttgcagttacttagatggcagattatgcgcctgctgaacttgtgactataagggaagagtttgataaacaatgtaagtagtgtgtgttctatattgataagtgcatttggcaagtaattggagaaagatgagttcaataattttcccagtatggaagtagaactaaaaaggaaatcaagagaatcctgaaacatcagactttgtgaggtggaaaaaccttgctgcttctggaccccaagtagtaagagggtattttagaagtccgatctaccaaggcttagtcttgagaattatgtccaagaaaggcctttgggatgtggtaattggctcatggaactgactggaaacacagggatgtgaattaaccaagatttggggtggcttgcaaaacagctatgagcctggtctaaatgcagagcaggatctaaaatgctcggacccataggcaagtcttggtaccatctttgtaaggaagtaggctgctaaacttgcagctcccatggagactttttcccccaaacccacttcagaagtcacccaagatggtgacagacaatgatgaattccttggagaggagagccagggacaagaagagaaaacaaaatggaaatggacttaattccagagagcagacttgatgtccaatcaaggaaaacatttttactaacttcccatcgccagccctgtaggctacacaaattattgtgtgtttctccttggtccatgttctgcatgttctgaatgggaaccttaaagttatcattctgcctcctggctgcacagggccacatcttgctgctttggagaggactccgtgtgagccaatggtcctgagcttggagcaggatggaattactagagaatcctttgcatggccaccttggagacagagtgagtttctgttttctttgtgtgaaggggcaacagaaacatgatgatctgccaacctgaaggcatgctggtgcagtcagtgccattgctcacctaacccattcatgttcctcttgcagatcaggtaaacttcacctccctgcatgtagcagaagccacaggactgagtccttttcagtatgatgtgggcagaagctaaggctgctgctttgggtcttggctcacagaaccatctcctgtgtaatccccatttcttttctccgtcgtggcagccttggaggccccttgttgaaagaaagggcaccgctaaatgaaataagccaaactgcaggttgactttagagaggctctgtctcacctgtggcccagggaagctggaataggaattttctgggatagcaactgctataaaatgatttgtcttagagagcatgaatcccaggacatgccctggaattctagcagcaaaactcccatggccaaagtcctttgggattttcccttttcccctccaagatttgagccagggaggggttagtgagtccacagctatcccccatcatcccttgtctatctctctctgctcctgagtcctatccagaaccagaagtttgtaacccacttgcttgtgtggccttctcctcctgtgtttagcgtgctattaatagacggatgtggggagactgtatttactgaacatgccaggcattgttctaaggtcttcataactagatcccagtttatcagaaccattctatgatttagctacccttctttctttctttctttttcctttgagacagggtcttgctctgttgcccaggctggagtgcagtggtgcaatcatagctcactgcggccttgaactcccgggctcaagcaatcctcctgcctcagactcccaagtcactgggactacagttgtgcaccaccatgcccagctaatttttagtttttatttttgtagagacagggactcactatgttgctcagactggtcttgaactcctagcatcaagcaattctcccacctctgcctcccaaagtgctgggattacaggcgtgagccaccatgcccagcctagctattttcttaaacccacttaatatctggataacatatacctagagatgtagggtaactttctctaggccatagagctgcatagagcaaaactgggattgaaacacaggtgtctgcccagagccaccctcttcttccttatacagcaactagtttctgtatattgtgtggtaggaataatctgagcatttgcaaagatggatagcctatttcctcaacaatactcaatgaatctgtgagccatccatcatttcttttgaaaacaacctttgttctgttatcagttcctatacatacatgaatatttggcaaggacctttgggctattttgtttatttttatgccggtatcaagtttgaaactgtcaaactcttttcctctctcaataaaaggttatagcatttaccttaaaaaattatgatttcaatatactgaaatgcaattcttctcttttttcagaaacaggttgcagtgcagtggtgtgatcatagctcactgcagccttgaactcttgagcttaagtgatcctcctgcctcagcctctcaactagttgggactatagatgtgtgtcaccatgcctggctaatttttaatttttttttttttcagagatgaggtcttgctatgttgtgcaggctggtctcagtcccctggtctcaagagatcctcctgcctttgcctccccaagttttgggattacaggcatcagccaccatgcccatcctgaaatgaaattctaatcattttcaaaatcataacccacagtaaaacttcttgaaactcatttttccaagtctctttcatctgaattctgttcccccaccctcgacaaatctccccaggggatctgcccagccctgaagaactctacagagcatgcactccctgttgcctatttctaaggccagaaaggtgattgtggttgttaggacaggtgagaaaccccatcactctctgcccacccactccagcctggctggcctcccagccctcctcccctcctcatacagcgtctgttggttcagggaagagatctattcccgcacagtcagggagctggcccctcctgccgcagtcccagagttcaagtcactgtaaaaccaaccacgcatccagtgccaagctggcctctgtggggagaggactgcatctcatatagcccctccttgcctcaagttcctcctgttcctgtgtaaagagataaacgatggtcctagtctatcttgtactcacgttagactctactcctccctgtctgtggcctttgggcaagtctctctcctgctcagagcctcacagcccctctcaggttccaaccacagtgcagaggacaggactcccagagtgtgtgcaaaaccctctgcctagcctacccagaggctgctggtgacttttccacatacccaattgtattgaactgggctgtttttcctgcttgccaagagctttttctttttttcctctcatctcagctaatccagtagctgggaccacaggcatgcaccaccacacccactaatttaattaattaatttatttttattattattttttaacagacagggtcttggtgtgttgctcaggatggtcttgagctcttggactcaagcaaccatcccaccttggcctctcaaagcgctgagattacaggtgtgagccaccgcacccaggcagccaaagcgcttttcacagagcagttcaatggttcaagaatgtggctctgcagggagcttccgcatgggaccctggctccgcccttagcagtgggcacctgacagataaccagcgtctgtgcttccagcttcccatctgcaacgggggatagtgcagtgtttatctcagaagattactgtaaatgttagttgagtgaaaacacaggaaaactataaaattgtgcctggaaaaatcataagtcaggagagcgtggtggaggggaggtgtggcataggtgacgtcttgaaaggggccctagagaggcttccaggtcctggggtgagcccattttctggcatgagttcaactctcgtagtgtactgtttgtgagaatccattgcattgtacgcttaagatatttgtgctttccatctgtgtgttatactttcaaaaaaatttgttttagtgcctgagaattagaaaaaaaatcctagagatcttcagacctccaaagctgggatccaagtctgtttctctgaggggatccctgttaatgtctggatcatggacagagtgaaaaggaacttacagtaatgtaaatttggagacagaaaataggtagtggcagcagggtgatggggcctggaagctgggaggggtgctggacctgctgggatgggagcagggggagagctgattgttttgtcccctcctgagtgcgagagtaatctgtaacccttccacagcctgtgatgcgggcctggagctctgcactgagctgcacgttctctgtgcccagctgccgaggtgtcagctcacttcagatgatggagatgcagaatatttggtggcttcttctgtgcttggagagccctgggactttggttccatttctcattattttgtgtggggttgggatgtgctttctgtcatgcaactgcatccactgccatccatatttaccaattcatctgtaagggaaccctaaagccagcccctagtctctttagatgggctcctaaattgaccattggaccccaggggccccacgaatgagaatgctcaggagagactagaacactatcagtccaggggagcagcttgggcagggcaggaggtagagtggggaccggggcttctctccagtgctcacacccagctacctgggtgtgttcaggatgccagggtaaagccccaaacaccacgacatcggggccatggactggcttcttaacagaattaagagcacccaaaaagagcaggtccccagcacctgggcactagccaccctcccttcttgggcgtgcctgggccgaggctcctgactgtgctgggctggcctggagcaacgctgacccatgaaagactctgatcagattgtgttcaactgtttccagaagcgacatgtgcgtcccagatgagaccaactgggcacagagaacgtgctgctcagtgcagagctccaggcccgcatcacaggctgtggaagggttacagatgactcttgcactcaggacgggacaaaacagtcagctctccccctgctcccaccccagcaggtccagcacccctcccgggccttctgctgttcctcagcagagggctcctggctgaaagataccttgataagcatgtgcagaaaactgtattcgctggagctttatagagaataggataaatattttcatcactttagcaatcttcatgaagttaacctagaagaaagtcaactttttcacgtccgctgctcctttagaagtcagcaccaatgcagtggcaagaggacatgcaagttgggaattttaaaaggtgaggtttgctctccagcgctggtcccttccaggtgtgaccttcacatcttctttccatgaggtccgggctcccatttgcagaggccgacagttcccagagtgactttcctcagaaaacaggatcttagaggagacagtcagaggaggggcttcatcctcccccctgcacagccccttgtagggattggaaagcgagggtctctgcccatgaggcagcagtcaccttaagctgtagtgtgggaggaagcctagggaatataggttggtgctgggacagcatttcctggttctgacttagagaaagtgttaaaatcccgacattcccgactccttctttgtgggagcccctgccctgcagatctcacggggttgttgtgagggtcacctggggtgatgtgtttggaagtgctttgtgaatgacacagtgggccttcctattcctgtcgctggcccttcaaccttgaatactaatttcctgggatctccaggtttcaaggtctaatcctggaagggtatgaggtgtccccattggaacattctacagcacttcctgggaggtcccttgcttccacctttgcccaacataacccctgctcctgttccctcagcctggagagcttgcccaggggcacaagatggtactggactgaacttctctttggggaaggtgattacttcctcttttcagctgtccctcttcctaacttgccctgtggaattccagggctctatgcagcatttgccagacatgagagagagaacttctagggcagggatctgccctgggtggggatggaggagtattctagagtctgggtgtcagaagtgtgagccctgcccaggggggtgatggactatccctgggggccaacatgctgctgtgtgggaagccagggaagatgctgctctttcccatcacctttgggatctatggagttgtccaccccgacccccggtctcctcaccagtggcctccaccttccccctgacctgtgccgcccctcatgtgaggtttcatcacctgcaccagtgcctgcctctctgcctccagacccatggctcatggccctctctctcctcaccccttccatgcctgttccctcttcccctagagcccatttccatccataccccaccgagtctttcaccacatcctcacctgaccccgcacctccccagcccacctttcccttgaaggagtgaatgccatcccaaaatatgcccaattggtatattgataattttatgttaaaaacattagagaaattgtagttttagaaagggtgagctgacctgcctcttcctgcatgtagcaagccataaagactcctctgggggcggcacccccacacaagggcaagaagagagcctttagcaccagagactggggattaggggtagcaacggacccgagtaaatgtacttcacgaagtaagccgtgttgcccactgattttatattcctgcatatcacctagaggctcccctggaaatttactgtccctagccagattctgcttggccttgtcatttcttctcaaatttattattctttgtctaaaaagtacaaaagcatcttgctttggctacttcttcagacgtcactaatttgggaagatccccatgtacctttaatataatacaatttttatgcttttctcttgttaatatgcttggtttcaatttggtttctagccgaggttccagccaaggatcccatgtaagagctaagtggggttggaggcgatctctgggtctctgcagaacgtggcgcagagcccggggccctccctcacaggctaggacgctgcttattctggagctactgcagctaagacccgggacctctgacccgagccagcaaaggcagggttcttactgccagccttccaggtctctgctgtctgtgtctttttctctctctaaattgggattgacaggataaaagatttgtgtctttttctgtctctaaattgagattgacaggataaaacatttgtgaactaattctttgggtaaaaagcgacttttagtgtttttgtgagttctctaggtttctatttgatccttttgatctcagagatggtctttgttttcctttgtctctgtctttttcctgccatttgtcataaggagaggaagcgtcaggtagagaacacaggcacaggtccttcaaagtctgctgggtccccagcgcttgggtttgtggcacttgtcagacccatgtctgcctaagcaaactgtgctgtgggtccctgaaacaaaaaaacaaaagggatggggttcccctctcgcctcgttttatgtcctgagagcttggctgtgtgacaaggaggacgcctctctggtctccgccatctgaggggcacagagtgtggctctgtgtcaggcagcagtctgaccagactggggactcaagacgcatgaggcccaggtggcactctctctgtctgtatgtgtcaagcgctcacggagttttgttgtaagacgccaattcataagggctttcttcatcttatccttgttgccctgattagtgctgggagattcccattccagtatcacctgcccagtgtcacagtgagtggacctgaggctgaaggcatctcagcttccacgggagactggaggtgtggtctgcacaagcactctccctacctgcacgtggcaacgcaagtctttgctttcttcatccatctctgagagtgaatttttggatgacgggctgccttttctgcacgtactgcaggaagacgccttgcgttctggtaatgatgggaagccacctcctggcctttccctggaaaggcagattaaggcactactggaacatatgcaccggcgtagatctgaattggccacggccagagatggatttgtgtttaaaacatgttagagagtgctcgttctaaacaactggtctgttggcatctatgggaagatcacactgaggaacacagaatgtactatggttagtcttaaaacatcccttaacaaaattaaggaaccaaaagctgacctagagcagacattgaaatccactcccaccataaatcctcctccacccacttatacccccaacacctccaactctcgtccctgacccaccagaggatccaatggatttctagatctccagtctgaaccttcctccccaacacccagccccatcttcttcacctctctctcctcaacaaaatcctgtgactccccccagcttcccccaaaccccttagacagctgcctgcttaacctccctttcctggcgtgacctacagaaagctttcagtctgatctgaaagtgcgaggcacacagggcatttgtggaaaagctggcagccaggaagtagacctggcacaggctccagggacaagcagtgaggctggctttgctgtgccttgcgccctctcctacaccccagggccttgtcatcagactccctcagctccagacctccctgtgcagtaactccctcctcaaagaattcacatccctggacagcagtggaccttttaaactataaagcccattctgctcctactttcagaagatcctaccaagtttagagaagaaggtatctaggattgaaagtacaacataagaagatattcagaatacaatagaagctgttctaagagaaaaaatgtgtagctgtatagttttaggtgcatttgtgagaataataagaaatttaaatctttttaacctctgaagattaccatttcctaagaaatttaacattttaataagctaacgttaactgaagaagttaggtaaacaaaaagtggaacaagactaaaatctgtaaaaaaaaaaaaaaagaaagaaagaaaaagtagaacaaaaattcataatgataaaatggccaggtgtggtggctcacgcctgtaaccctagcagtttgggaggccaaggtgggcagatcatgtgaggccaggagtcaagaccagcctggccaacatgatgaaaccccgtctctactaaaaatacaaaaattagctggttgtggtagtgtgcacctataatccaagctattcaggaggctgagggaggagaatcacttgaacctgggaagcagagattgcagtgagctaagatagcaccagtgtactccagcctgggtgacagaacaagactccgtttcaaaaaaaaaaaaaaagtaagaaaaaaaagaaattcataatgataaaagataaattgattaaaatataaaacaaattagattgatgagaaataaatctggttaactataaggaaatacataatggacaatgttgggaaaatatgaacaagaaaaaagagaaaataacaaaaaaccatttatggattgttgaaaagaaagctcacttccaaatttaaagtaaattaagggtaattaaaatgaaataattttgtgcaaaaatgtagaaaaactactaggaaacaaaagacgttttaagaaaagtgttaactagtatcgtggagatgttaatttgatcagtaattacagaagattttaaacttgaagtcaaacatctgcttctaaaaggcagatgatccttctgctactcaaccaagtatgaccaggcctccacaaagaaataatcctcatggcatgcagtatgttccagtgaaaacaggaacaagacatgccatggaactcatttgaggagtgcaccgcagacaaaatgtcaaagccagaaaaggagggtatagcagaccacggtacagtgtcacttgtacactgttggtgggaatgtaagttagtacagccactgtggaaaacagcatggatgttcctcaagaaactaaaaatagagccaccatctgacccagcaactccattactgggtgtatatccaaaggaaatgcattcagggtgttgaagagttgtctgcatccccgtgctcattgcagcatattcacaatagctgaaaaacggaatcaacccaggtgttgtggggaggaaaagctttccctctaccctcagagggtttgataattgagtctgtgaaataaatgggcagcaggcagattaacaggagaataaggcttacaaattttcatgtgggcatgggaggcatcacatgaaagaaacgtgaaatgcaacacccagtgaggccggaagcttatgtatttttctgcaaaggggagaaagagaggagacaaagggaaccgaagggagagtaaatgactttggtgaaagataaatggatccctggaagaatgaataatgagaaagggacagctgtgacgaggtctgtctgggctgctgtgacatgaaccaatcttcccttgttgacgagattcccagggaggggattcatgccagctgtgctccctttggaggatctgtctttcgacagatgagggagaaccagagaaaaccctccctgcatttgctcctccaccactgccctcagtttgaagcaatcaacacatcaaattggcatattctgggtggggggaaggaatttcctgaacttcttcagtgtacacacacggatgagtggaaaaagaaaatgtgatgtacatataatgagataatagaatatcattcaccctaaaaaagaaggaaatcctgccttttgtgacactgtggatgaacccagaggatgttatgttgagtgaaataagccagacaccgaaaggcagatacagttgacctttgaacagcagaagtttgaactgtgtgggtccatttatacgtgaatttttctcaaaaaaagttacagcaagggggcctgcttctcctgcctcttcctttccacctcctccacctcttctgcctctgccacccctgagacagcaagatcaactcctcttctccctcctccccagcctcctcaacctagagatgatgaggatgaagacctttatgatgatccacttaatgaatagtaaacagattttctcttccttatggttttcttaataccattttctttcctctagcttactttaccatgagaacacagtgtataatatgtataacatacaaaatgtgttaatcaatggtttacgttaacacataagacttccaggcaacagtaagctactaatagttaagtttttggggagtcaaaagttatacacacgtttccaactgtatgggggtgtcagcacccccaactctcacattgttcaagggttgactgtattgcacaatctcccctaactcctgtttttagatgtgaaatctaaaaaaattgtactcacagaagcagagaggggaacaggggttgccaggggctgggagtggaggggatggggagatgttgatcaaaaagtacaaacttctggctgggtgcggtgactcacacctgtaatccccagcactttgggaggccaaggagggcagatcatctgaggtcaggagttcaagaccatcctggccaacatggtgaaaccccatctctactaaaagtacaaaaattagctgggcatggtggtgcgcacctgtaatcccagctacttaggaggctgaggtgggagaatcatttgaacccaggaggcagaggttgcagtgagccaagatcatgctactgcactccagcctggtgacacagccagactccatctcaaaaataaataaataaataagcacaaactcccagttacaagacgaataagttctggaatctaatatacagcatggggactatagttaataatacttgacatttgctgagagcatatcttaaggttctcatcacgcacacacaagcttactgtgtgaggtgacagatgtgttaattagcttggttgtggtaatgggttcacaatatatacatagatcaaaacatcacactgtgatcatcacatcaccttaaatgtatacaaccttagacaactatacttcaataaagcaattacacctcactttgtcaattatacctcaaaaaccttagcaatgtgaagctgataacattcagagggaacatggaagaaggcaatcttttaactaggtttaaaaggattaaagataggtaagaatggctgcagtcactagaaaataccacattgccatcacagaagacaggtttgtttgaaacaccaagggggaacttctggaagtgaatagtgaaatcagtgaagttaaaaattaaaacacaacagaatagtgaaatcagtgaagttaaaaattaaaacacaacagattagcctcagatgatgatagaaattataagaatatccatatgtggaattgtctagaatatatagcaataaagatttgcaaactgtgaaagatcatcaggagactggagaattgaaatgagaatatgcaaaatatgcttgacaataattacaaaaggagaaaatgcagataatgagagaacggtcctattcaaagggataatggctaaggaatttctggaattgatgaaaactattgatctttagattccagaaccacaatgagtgccaagaataaatgaaagtagataatatgcagaagtattgtgatactgaagtaaatcaaccaaaattaatgtttaagagacccagaatctcaaaagtatccacccacaagatagtttgcactcagaaatggaaacgggagaaggttacagtggagaaagcataattttataaaacacactcacccaggtggttgcagtccagggagaaagcccacctcaccctcacagcaggggagaaactggcttcatgtttcttgttagcggttgcactgaaaaagcccggcatcccctctgtactgttcctgctgaaagtgcaaaacctgattctcaatgtgaggacgtatcaggcaaccaaatggagggacgttctattaaatgactagcctgtatctggaaatacatcaatatcaagaaatcaaagaggttgcagaacagttccagatgagacaactgaatgaaggcatggttcaggatcttcttcccctataaaaacaatattggaaccgttggcaaaatccgaagaagatgtgaaggtctgagaattgtattgtgttaatgaagatttcctgtttttgatcactgtactgtgataatgtaagagctgcccttggtttcagaaacacacgctcaatacttgtaggtaaaggagcatcatgtctgcaactgactctcacagggtctaggaaaatagtgatagtattctacatctgcaccaagagaagagaatttagcaaatgtagttgaatgttaatatgagaggaatctgaaggaatcataaatggattttttttgcactactattgcaacttttttttttcttttttgagatggagtcttgctctgttgcccaggctggagtgcggtggtgcgatctcagctcactgcaacctccatcccctgagttcaagcaattgtcctacttcagcctcctgagtagctgggattacaggcaccccgcaccatgcccagctaatttttgcatttttagtagaggcggggttgcaccacattggccaggatggtctcaaacctcagggaatccacctgcctcagcctccctaagtgctgggattacaagcctgagccaccacgcccggccgcaacttttaaagtgtctgaaattacatcaaaataaaagataggaaaaattagagaaattaatgtagacaaggcagatatctcaacagccacacaacaaccatggaaagatttatttatttattttgaggcagagtttcactctgttgctcaggctggagtgcagtggtgtgatctcaggcttactgcaacctccacctcctgggttcaagggatccttccatctcggcctcctgagtagctgggactacaggcatgcaccaccacacccggctaatttttgtaatttttggagagacagggcttcgtcatgttgcccgggctggtctcaaactcctgagctcaagcgatccacccaccttggcctcccaaagtgctgggatttcaggcatgagtcactgcacccagccaggtttctttaatatactgaggaaatataactgtcaaccaagatttatctgcttacatagtgatcactcaagattatgaattgaatcaaaaccttttcaggcaaaaaagaagacttgaagagttcatggctaagagaaattgcattgaactaagtagtaaggatgtagttgaaggaaaccaaaatatttcaccccataatatatttggacacattttgagatggctgtttagaggggcctgcaaacagaagcagccctgcaaagctgtcttttgaggggaaggtttgcatctgtagagaatccgcactgacgcaggcaagtttcctctgaagccttcccttgtctggatctaggaaggagtccctcacagtctgacatatttagccatcagaaagaaacatttaccatctattctctccgaggactgctgtctgtgtggttctgtctgcattctgagaccacctttgccagccaggcctcctcctccctctcccctaacctgtcttgctgtcatcccagcctctgttccttctgtaatctcaaggcggtaaataagcttctgcacaccattgtggggttgggatcatcgctctggtccttctccatctgcacattaataaacgtgcatgccatttctccaattaatctgacttttgtgagttgatttttcagtgaacttttcaagggcaaagtggaggttttcttttggcccctacagttttggtgtcctgaacagaataccaaagctgctttgctcttctggaagcttcagtcaggggacccaggacctgacaagctggcagaagggtaacaaattcttaccagccaggcttctggctggtctctctgtggaatccaggtgagcagatggtaaaaatcagtcatttttcctctgcaagatgttgattagtgtgagaaaggatctgtgtgaacaatgttgggtgcagcgactctggtgtactttttggtgtgaatattcatattgtttagtgcccttccttccaggaggattcttctcctctgtcttggtcttcctgtgttctgtcctgaggagaggacttgtagggtagaatgggggctgaagatcctgccagcccattgttcaggccagacctgaagagcagccagtctgcggctgagatcagatgggcattcaaactttgctgtgggtcctcaaaatagaagccaagccaggtgcggtggctcccagtccttggggaggctgaggtgggcagatcacttgaggtcaagggttcaagaccagcctggctgacatggtgaaaccccatctctactaaaaatacaaaaattagccaggcatggtagcgagcacctgtaatccctgctactcaggaggctgaggcaggagaaccacctgaacccaggaggcagaggttgcagtgagccaagatcatgccactgcactccagcgtgggtgacagagtgagagactgcgtctcaaaacaacaacaaaaacaaaatagaagccagatgaggacccctctcatcttgttttatgccctggagtgtttgacttgtgacaagtgggagcactgtctcttgtttctaccatctggggtgtgatttttgggtcccatcaggtgttcagtctgaagatgcctgggaacctgagatacaaggttttaggcagcacactttttgctctgaatgtgtccagctgttgggaatgtttgtcttaataagaagtcccatccataaggaatttttgtggtctggcccttgttgcctggatagtcctgggaaagtcccatcctaggagagctgtccagtgtcatgaattaaggggtctttgatgggtgtccccagaaatgtgtgggtcaccagaggcactgtgtacacaaacaccatcctaaccatgtgtggcaacagagtccgttgctttgcagggacgtggatggagctggaagccattatcctcagcaaactaacacatgaacagaaaacaaaacactgcatgttctcctttataagtgagagctgaacaatgagagcacatggacacagggaggggaacaacacacactggggcctgtcggtggtggggagggagagtatcaggttaaatagctaatgcatgcggggcttgatacctaggtgatgggttggtaggtgcagcaaaccgccatggcacatgtttacctatgtaacaaacctgcatgtcctgcacatgtatcctggaacttacaactaagttaaattaaattaaattttaaaaagaaagaaaaacaatagacaagaaataggaactaaggagctaatttttattttattacttcaaccaataaaaactgtgggttaaaattaaaaaaagtctcttcctatctgagcctgtttctaggagtgaattttactggagggatctttggaactgcctatcctcaccctcttcaggaaacaagtctttcttaaatggtaatagcctactctaagcctgaaaaaccacatccggggctttccatgaagaggctgtgggatggagttgctattagagtaagtacatcattggaaattctagccattagcagccaaaagatggattctttaagtcagaaagacctctaaattacaaaaaatagtttagagatttcttattctaaacaactgccttatttatgttcattggaagattaaattaaaagacacatcatagtgtcatggcttgccttagaaatcctcttgatgaggttaaagagcaaaagtctgacctgaaacaaagctaaaatccttcatatgctccaaatgcctgccctgggtcccttgtggaatctgcagtgccagccactccaccttgcagtctatttttttttttcttgagacagagtttcactcttgtcacccaggctggagtgcaatggcacaatctcggctcactgcaacctccaactcccaagctcaaacgattcttctgcctctgcctccagagtagctgggattacaggcatgtgccaccatgcccagctaatttttgtatttttagtagagactgggtttcaccatattggccaggatggtctcaatcacttgacctcgtgatctgcctgcctcggcttcccaaagtgctgtgattacagacgtgagccactgcacctggccccaccttgcagtcttgttgttaaaattccacacattcactgccatggcctgggtgcaggtcctggtcaggaagccagtcgcttttggtttgatatttgtgtgacttttgactttgtggcgtacccacttgtcattgatcctttccccttccatagacagcttttggttttctgtcatctcctgtttgaggggttacacggggctcttaggcttttgtgtgtatatggtcagctgaaaggctgagaccctggaagatatgactggcagatgtgggttgtaccccatttgtggctagcaaaactttcctttctttgagctgtctttgaggtggttctggatctggtgaggactgctgtgctcctctctggagatgcctcatgtgtccttggttaagtcataatcttgattaagccttattggttttggtgagccacttgaggcagtatctttgtttaaaaaaaaaaagatccaatggtacaatctcctgtaatcccagcactttgggcggctgaggcaggaggatcacttgagcccaggagttcgagaccagccctgggaagcaaagtgagatcctgtctctacaaaactacaaaaattagccaggtgttgtggcatgggcctgtagtcccagacactcaggaggctgagctgggaggatttctggagcctgggtagtcgaggctgcagtgagctgtgatcgtgcccctgcactccagcctgggtgacagagtaagactctgtctccaaaaaaaaagtttctcttcttttttgagactgtctcactctgtcacctatgctgatatacagtggtgtaatctcagctcactgcaatcttcaccttcgaagatcaaggaattctcatacctcatcctcccaagtagctgggattacaggcatgtgccaccgctcctggcactttattttattttattttattttattttactttattttattttattttatttttagtagatacagggtttctccatgttggccaggctggtcttgaactctggtctcaagtgatccacctgcctcagcctcccaaagtgctgagattaaaggcatgcgctacatgccgagccataaagatagtttttaagttattgctacagtaaaatagaagggccagacatggtggcttatatctgtaatcccagcactttaggtggctgaggcaggaggatcacatgaggccaggagtttgagaccagcctgggcaacatagcaagactccaatctctacaaaaaaatgtaaaaaattagctggttgtgggctgggcgtgatggctcatgactgtaatcccagcactttgggaggccaaggtgggcggatcacctgaggtcgggggttcgagaccagcctgaccaacatggagaaaccccgtctctactaaaaatacaaaattagcctggtgtggtggcacatgcctgtaatcccagctactagggaggctgaggcaggagaatcgcttgaacctgggaggcggaggttgcggtgagctgagatcatgccattgcactccagcctgggtgacagagcgaaactccgtctcaaaaaaaaaaaaaaaaaaaaattagctggttgtggtggtgcatgcctgtcatctcagctacaacccaggagttggaggctgcagcgagctatgattgcaccactgtactcaagcctgggtaacaaacgagaccctgtctctaaaaataaataaataaataaaaagaaaagtaaataaaacagaaacatcttcagaatttaatttagacatttttgcctgggtctaattaggcaggtttttactgtctctgttaggtgttttacagtcataaaactgaatggatagcgggggggaaaagaaaatagaaaaaatgcaagaagttataaaaggtttatgaaaatcttattttatgtgatcaaaactgagattgaagggatctatttataagattttattaaaattagctttagcattaatacaccgttgcaaaggcagaatttgtttttctcttttaaacatgattttcatgtagtattaataagcgatagtaaatgatttttgttttccttgtaagtaaactgcacaaaaaagaggagagagatggattttgtttgcttcatgctgtcttcattaggtcttttgattatttgggaaacagagtctcccttctatcaaagagtaaaagtttttggttttaaaaatctttacattatcacttggggtaatcatcactaatgaatgactattactttatagtggcgtgtgattcatcctgttttttatcaagtgttttaaactgttgatatttggaaaacttcccaaaatctaatttgaaattatgaaagtaagtattttcatgaagaactcctggaagtccaagagggacgtattagtcttatttggtatgcaaaaatcatatggaaagactggccacataagaaattgtatttaaatttctttgagttgtagttataaaaatgtgttattaatatgtgttcctaaatggtatggggttactaaaattctgatatgtcttcatatgtgttatcagtaataattatgattattatattaaattgctgaatgtcacagaagtaaccaaatttccttgtcacttgtgtctttaaccctggttattttaagtcttttgtcatccacagataatttttgttttactttgactcttctcagaaagcagtttatgatttattatagtcaaaagcttgcttcttcttcaaggaaatttatcaaaaagtccttgacaagtactcttggatacagatttccggtaagtttggatatcataccattggactaggcaaaaacttccagaactctgataagagaaggtgatgggttcctgaagattgctaacccaacatcaagcagaacaagagttaattacatgggactgaactgatagaggactgaacatttttttttctcgactctttggtttgaaacattgtggattctttctatgctttgttttccagaatcaagaaaactatttcctcttaagccatccatagcttttaacaattgaacaaaattgaaacatttatctctctctctaccagatttctctagaaatctgttatttgcataagctcagtaagaatggttttttttaaaataacaggacataactggagacactggttattttaccaaggttttgacaagaatggcatattttcagatatgatgagcgtatttagcagaactaaagttgattttatagatctaataaaaatccttgtggaaagactggccaggtaccttgtctacacagttcccttacaaggttctggaccttgcagtaagtaaagaatgtcactttctgaagggcccaagaacctcaagatatattgggacctcaagaagggaggaattcaccaaatttgtacaggcattacaggcgcagtctgatggcaaactcttggcttggtttcctagcctttagaggattttaaaagtctaatctgaaattccttatgaaaaagttccagcaaggccaacttaaaagaatggccaatcaccatttttttctgtactttattcaaacaatcaggccaattataacaaaacgaaaacttattttgtgaataaattggtcctattgtgatttgtctttgttagaaatggggaactggagagagaaaaactatgtttcagaagaaaactatagtatacccactattctattctagccctgtccattgtttttcagtttttattacttgtctacaactgggactgaatcctgaattcttttctggctacaagtctccaagctaatgttctcacattttctcacatttttctgacttggaatcactagaaacaaaaaaaactgtgcttttcttaaagccctgcaaattgacgctagaaaacttgatataaactttaggagaaatcactatagcaactttacatgtaaacagcctttgtacctgttgatgtatagactactcagaaagtttgttggaacacctgattccaactaatatccagaaaaatctgtcagattaccactacaatttgaagatgcttcagcgactctggaaaaactagtctatacactattccagacattaacctttgtttttcttctgtttccatagaaatgtctcaagaagatctgagacaaaatatttaaatttgttcttttctgctcattcaaatttgtcatttcttttctttgcctgtctcttatctaacaagctccaacctaaatatctccaaaggaatcaacttgcctttttatatgtgaaacatttgaagtttcaaagtggggagtggagaaaaccaaaaatattttatctcaatatatactttggtgcactggaaaaaaagactggaaaaaaaaggaaaaggatactcttggcatattttgagatggcttttcagagggcctgcaaacagaagtaggcctgcaaagttgtcttttgttggagagattggaaagacaaaagcaccccacaaatacaatttatttataaaacattatgtgttgtcttagtccattttgtattactacaacagagtaccacacaggcggagtaatttataaagaaatttatgtctcacagttcttgagactgataggtccagtattaagatgctgacatgtggtaagggaaggctttcttgttgcatcatcccatggtggaaggtcgggggcgggggagagagaagagagagagcgagcgagcgagagggagagagatacccactgccatgataactaacccactcccgagataagggcatcaatccattcatgaggttagagctttcacggcctaatcacgtcgtcttaaagattccacctactttggctcttcctcatggcacctttttattttaaaaaataaaaggtcctacctcttaatgctgttgcactggggaccaagtttccaatgcatgcttttgggggccacactcagaccacagcaggtgtctagccccactgtgtcttgcagtcaagcaaacaaagccaggaaggagtcgggagccctgagccacgtggcctgtcaaggaatcacatggaagttatgtctgtttctcattgctgctatggctgaataccacaaactggcttaaaaccacacacgtctgtgctacatttctggaggcgagaaatcccaaataggtctatctggctaaagtcacgttgtctgcagggctgcgctcctttctgggggctcctggggagactgttcttcaccatctcagcttccagaagctgcccacattctctagctaacagccacatcactccaacctctgcttccatgcccacctctctttctatgacctggccctcctgcctccctctttaggaacactgtgatcatcttggacccacccgtgaaatccaggacatcttctccagagcctcacctcaatgcaggggcacatccccattgccacatatgtaacatggtcgctggtttcatggcctgggatgggaatagcttttggggggcattgctctgcctaccacagtaacgaagagcttgggacagctgcacttgttaacatgttggtccacaagaactaaggccctgaaggatttgactgcttcccgctcccttctcctgactccaggtagcagtgaatccacaggagagacagggatcagttgaccttagggtgtgtctggtgtcaactctaattggaccagtaagggaacagaagccttgagaaagtaccacaacagtctgaaagtactcagacagccagtgtctgtgaccatgctgccattcagatttctgccacttgttttccaggctgcagattcttcaacacacgaaaccagtcacgcgacgggacactcaatggtgctgcttgtcctgcttagtttggcctggggttgcttgctacaaggcaagctccacccacagctctgataacccgcccttctctccagtctcactgatctcccgggtggacaatctggaaggggtcttactggagttgtgaggcaggcagaggccagaaccaacagccatgcctggttagagaatgcagcatcctaagcagaggcaaggaggaatctggctgtcctccaagtctcagcctcttcagccggcaccacagacttctgtgcccatgcgcctgggcctgcagctgcctgaggtccatatctattatgtctactggctgggccagggccgtgtcccccttctcccagctgagtcagtgtctgaaaagcagacctgatattaatccatatgtctagcagggtccttgatatcaacacaccaaaaggaggaaaaactcatcaaactggagtttatcctcaattttttgttggggtacaacttcacttgtcacaatatgatgacaataaaataaaagttttataagatctctcaaacccaagggttgggaaacaaattaagcctcaaatgaggggttatgtgtgccagacaaattataggcctggaatttggagggccagccccacctggagctaccacttggcagccccttcactcccatagcaaccagcacaaactaggcagaggtgggcacctgccagggctgtgttcctcccaaagcccaccctgccccaggggtgataccctgagggtccagtgctcagtccagtcctgcagtcagcccagcccatacccaacatcctgatttgccttccaacagcctttggctggtaacatctcaccccagatttccagccggaaagctactctggaaccaacaaactcagattccaaggagaagagagaaactcacaggaattgcagcctggagagggtaagctcactccatatcttgatacgtagaccagtaagatccaaactgggctgcagcctgcagaggcatgtggctcacacacagcttcctatcagagttcttacacctctgggcatctcatctgagatgtccccgtctctgccatggtgaccttcccctccacccgtgccctccatccttcctccctgtggtgcgctcagccttgatccatcaattacctctccctctcttttacataaaactcagttctttgtcatccacttcctgtcagcctttgcaaaaggtgaactctcacacgagaaataactgaagttcttctatgcaccgctgacgtgagtgtagcggctggagtgtgaaatcagagctacagaggcaggtggaccggtgcatatctccagtgggtgaaggtacatgcatgtccatttcattataatttttagagtataaaaatagactctatatcccctactgagtataagatgtcttttcacagtaatgagaaataaacaaaagcaacccctctcccacataaccagtgtaaatttgggctcttattcaagtcagctcgggtttgaattctagccaactggtaagaagcagcatgattttggacaatcacttaacttcactaagtctgttttctacctataggatcaagcaccagctccaaacaaacaaacaaaacatcagaaggcagagctgtgatccaagccctctttttcatgttcagagcatacatcctccaccttcatcctacaataatatcccaactaatggaaataattatttctatttttgattgcttgtgacctttatagcagccatgcatgaggacaccctccacccctacccttgttactaacacgtacaattgaactaaaaaatatcaagacataatactcaacaaacaacccagtccctgcttctcatgttagttaaaagcacaccaacaggtaactgggagattcatactgtgtaaagtagcaaatattccaggccaaatattccttgtgggaggagcagtgatgatctctgcagctctccatgcagtgggaggcctcccttggactggtcgttagtgaacctgcttcacaccctccacagctcttcctgcagtcttccaaggcccccagacttgccttgtcccctctcacaggagtgctctgtctgcctgttgatgctggaggtgcaggtgggagcttctcgggccaactgctggggtctctgtctcctcagatctgctgcaggagaacatcttcctgtaacctcatcctgtgtgtctgcccattggctctgccaactcacggggtggctgacatactctggacaagacacccaccagcatgagtttgcctcttctttgtcacggcagtaaggctttgttctaattgtgtcacaggagcattgaggaggacagaagcagcaactgtgacctcccccttggccatcagaggcacagctctgcccagctgcaggccacctgcgggcagaccatggctctctgacactctgcatttgaaagcaagtctacagttgtcttccaaagtgctgactcttttgaaacatcatcaaaaagaaaaaagaggagagattggaagaaaagctgtgagatgatggaggcctgagagggagaactgaagaagggtggaggacctcaggccagggccaagagggaccagcactaaagccaagggtgggcaggagcaggggcttgtggatgtcccaactcagacagtgctgccctcttgcaccatccctcaacatacaggtgggcagtgtgactgcctgtgccaaggtgggcaggaaggggaactgcctcctatcaaggtatgggaatttcctcctgtgtagggaagtggagaacctattatttttgctacaacaatgttccttctcatcttgtctccctcaaatagatgctgggatcctggccaggaggtgctgtcttccggttttctgtctgtccctgggctggagtctcaagtgacaggacaggacacctggcagactcctgaaaaactctggcatgcctgcagtgtgccctgaaatggacgctgccgtccctgcaacagggacacatgctcctttctctagagttacagtgtcttcaggcttttcatcttcatggaggtcagtttttaccttaagttattaattttcttacaacatttagcatcttggcagcaggctgtgatgcttgagcggtgctcacacactgagttcttagacctgataatgcttattttaaagttgcaaggtctactacattgacccgaggaataaaaattaaatcttaagttcccccagttgactgatagaaccctctcttggccaaagggccccagagaaaccttaaaaactgagctcctggccatgatgggatgggaggtcagatacacttcaccatgtcccttccatattaacctttagccagaactctttcctaaggagtaagcagaaaccagctctggcaaacaagaaacacaggactcattcctttatcatctgtagccaatcatctgaggccgtggctggactcaccctacctctttgcagttttggagtgacagtcaccagcttcacagtgcatccttcctaaaatggaccaccgcctctggaccagttttggctggctcacagaggatgcacagtgagtggtttgtggcccctgcttcaccttttgatgtcagaggctaaaaactacaccctcgcatgaacacgtgacccatgaagaggcatgaaactcaatggcacattcacatttctcctttcataaatattcattgctcctcctatagtttattgaatatgtatgttctgccactccattcagcataaattccacacagaatacagtctctccttcatatccacgggttctgcatccatggattcagccaacctcgattcaaaaacatttgaaaaaaaagaatgattgtgtctgtactaaatgtacagattttttcttgccattattctctgaacaatacaatataacaactatttacatagcatttacattgtattagatataagtaatctagaggtgatttaaagcaatcttgtccaacctgtggcctaccctccaacacaaatttgtaaactttcttaaaacattatgatttttttttttgcgattttttaaagctcatcagctatcgttagtgttagtgtattttatgtatggcccaagacaattcttcttccattgtggcccaggaaaaccaaaagattggacacccctgatttaaagcatgtggaggatatgtgtaggttatatgcaaatactatactttcatatataagggacttgagcatccggtaattttggtgtccaaatcaccaaaacccttccagaggaggagttttgggaccaatccctttgaagataccaaaggataattgtatttctctgatcactggtcactaaaaagtgtagagatttctccgcaccaaccattccttcagcagataacagctgggtgtctcctaattcaattccattctgaaactctctacctggacagtgtcagacctcacaggttaagggctcagtcccaccagactgtccctgcttcagatgccagtcacaagtagtaggttgtgacctgtgctcctgcccaactggctgcaaatcaggattcccagcatcccctcctcgggtttgattaatttgctacagtggctcacagagatcagggaaacactttacttacacttcttcatttattacaagggatatttcaaaggatgaaaatgaagaggcagatggaagaggtgcgcagggtgaggcatctgggaaggggctcagagctcccacaccagctccagacacaccaccctccagactccacgtattcagctatctgggagctctccaaaccctgtccttgtgggttttcactgaagcggcattacagaggcatcatcaaccacatcactggcaattggtgatcagctcaaccttcagtccctctcgtctccccagaggttggcaggtggggctaaaagtcccaactccctaatcccgcctctgtctttctggtggccagcccccatcctgaagctctccagggtccccagccaccagtcatttcattagcacacaaatgacactcttagtactctggagattccaagggttttaggagctttttgccaggaaatggggacggggatgaagacaaaatatctatctcaaaatagcacaggagtttaaattcgtaacaggctttctaacatgcaatttgttaagtcattgcatgacttaaaaataagctattcgaaagctttagaaagctatttggaaggaaaagttggtgagtgttcatgaaaagatatggatgaggctgttcatttcagccttatttatttgtctatttatttatttattttttgagacacagtctcactctgttgcctaggctggagtgcagtggcacaacaacggctctctgcagccttgaaatcttgggctccagtggttctcctgcctcagccttctgagcagctgggaccacatgagtaggctcctatgcctagctaatttttatttttttattctttgtagcgacgaggtccccctgtattgcccaggctggtcttgaattcctgggctcacatgcctctcccacctcaaccctcaaagtgttgagattacaggcgtaagccactatgcttggcctcagccttatttgtaatgacaaaagaaaaacaatctgatccatcctataaactaaaaataaaatcctaagccacccccactgactgaacagaccccctcttggccaagggaatcccaagccttgttacactccttcccttttggagtttaggtgcaactgtccagcattaacattagagatcctaagactgacaagacagattctgtgtcaataaaagaccaaattataaagaagacctaaggccatgccaggtgagggtttagtcaggcctgcaggccatcaaccttgctacatagcatccttaacttaaaacatgcctttccgctgacatcaaattttagacagagcttactcctttaaccaactgcaaattagagaatctctgaatccatctataatctgtaaacccctgcttcaagatgtcccacatattcaggtcacaccaatgtacatcttccatgtgttgacttatgtctttgcctagaactctttcctcctcaaaatatgtacaaccaaactaacccgagtgcctcgggagtgcttcctcaggcccttcaagactgtttccccaggccactgtcactcattcactcatagtaaacctttttcaaatattttacagagtttggcttttccatcaataatccatgtctgagaattcttaaatcagcgttcctcaatttagattatctatttgctcctgtcactgtttttgacataccctgatatgacctatgcttttacctaattcttcttgcacatccgcagagacatgttctgtcagtgtcgcctcccaagtgtatcatgcatctgtccacttgccgccatctctctgctacccccttactgggagtcctgtccctcttacttgatggtaagtgctttgtgcttcttacttcttgacagtaagcgcttgcgaatggtgcttcttccagccaattctcttatgcagcagccaaaatcccgttatggaaaaaccaagcttcttcctgctacacaacttttttactagctgcacattcaggacagccagtgtctcattaattactcaggtcacaattcctatttttacatcagaggacccttcaatggctgacgtcctgtgcagtgctggcccctccacacacacagccccttccctgcgatgtcaccctcataatcctggtagctatgtgccatcaactcatgtatttcttaataagagctttagtgagacgtcatttgcatttcaaacaattcaccactgaagtgtacaattcagcggttggtagcatattcacagagccgtgaagccattatccagtcaattgcagaacattttcagcatcctgaaaggatgctccccatcccttccagacctaagcaactgctcatctactttctatttctacgaatttgcctattctggacatttccatgaatggggtcatttatgaccggcttctttcactgaacgtgctgtttctggcgttcaccatggtgtggcatttctcacgtgtgaatgtcgcattgtgtggatggagcacgtgttgtttattcactcatcagtcggtgaatatttgggttgtttcctcttcttggctataatgaatgatgctgctaagaacatttgtgtgcacgtttctgtgtgaacatgttttcaagagttgtgctcttaatacatttgaggaagttttggtggaagagaccacaaaaaatggcatatacatctcagccttctgtttatatagaaaatatttcttgaaggatacattaaaaattctagcagcatgaatgtctctggatagtgggccttgggctaggtattatttaagaatttattgattttttgcattaaagagaaaatattactattctaattaaaaatattataaggaagtaacatgccacactttgcctagcttggtttgctagttccacgaagtcactggcctggcatgccaggccctgacccttcctgcctcactcttggatttgccatagaagcacctgccatttgcgctcctgcatatggaatctgtttgctccggcttcaagcctcgtgcatttgtcttctgcctggacgacacttccatccacgcctctgagagactgaacactgctcacctttcccactcacctggggagccttcccttaatcctcgagactaaattctctcagacaccacatgccatcactctcctcattcttaccctcatgttgactccgtgtgtgtgtgtgtgtgtgtgtgtttgtgtgtgtgtgtgttagagctgtgtggtgctcctcttggaaacagtttctgaacccatctgcaggcctgctgcaggagcttcagaaggcacatagggagagggatgctggagtgaagaaggtctctttattggatgttttctttctaatttcaggtggtgactttatgcttggtggatctgaagcaacatcctcaagcacaaaatcatttttatgatgtaaagatccatttgggggagcacctggcacctgtcaaacaccacccagctccgcctagaaccgggctgtgtttgaccctgctctctcctcagactgtgctccatgtggacacctgtggctagctgggtgagggggaagactgcgggataaagagagaaggaggaggcaggagaaatgcacctgggcatgctgccaccccaggcacgcacgtgaaatcttcgtggatgggcaggaaatgcccatccgtagtagcatgggaagcagcatggggataaacaaagaccactcaaatgagagacgcaaaggccccagcaagggagtcagccatcgccagttgcattttggtagaaatttccaggcagacagaggatgggaaaagttcacagtggaaaaagaggaggctccaggtgcactccgagtggaggctgttggcttggggaagctggggtggccgaccagaaacggggcctcctgtgtggtcagttagggcagcagattttctggttggttctaagttggaagctgggacaaaaattagggaagctgttattagtcaagttctggctgttttgggctggttgttacagggcggtgttagactccctggattgactggagatagcgggctggcttcctgcaggtctgacttctagtgggctggcttcctgggctgttgctgcagatcccaggctggctttggggctggttgctgcagattatggctcagagtttgatttttgtgtgtagtctcgccactgtcattgtatattcagtctctcacaggtcagcttatcagcacctgctgggccactccagggcttgctacttcaaccaagggatgggtcttgcagatctaccttgctagcccccatttcagatgtgacgctcgagtcctaacaaatgaagggcacatgtgtggaggcagctaacagcacagagccaacttctaggagaataggacgagagaacataaagatgtattgaaaaccataactcttgaaaaccgtaaaatctcaatcctcaggcagtgtctgaaataatcacaacaaaaagttctttataaggacagaaaacccacctttcggccagaatcgccatcttccagtaattcgccaaagtgacgaacacaaagggaaagaggagaggcacccgatatatgttctctaggccttttagaaaacatggagttgttcctttggccacgtatatgcgaatctataagaaaggtgatattgtagacatcaagggaatgggtactgttcaaaaaggaatgctccacaagtgttaccatggcaaaactggaagagtctacaatgttacccagcatgctgttggcattgttgtaaacaaacaagttaagggcaagattcttgccaagagaattaaggtgcgtattgagcacattaagcactctgagagccgagatagcttcctgaaacatgtgaaggaaaatgatcagaaaaagaaagaagccaaagagaaaggtacctgggttcaactaaagcgccagcctgctccacccagagaagcaatgggagaaccaatgggagaaccaatgtagaaccaatgggaaggaacctgagctgctggaacctcttccctatgaattcacggcataataggtgttaaaaaaaaaaaaaaaggcctctgggctgtaaaaaaaaaagtagagaaaatccaaaaggaaataatctgtaaagaggcaaaaccagcaaaatcaagggagactgagaaatttgaaccacagcaacgggaccccacgggatcctagcgttgagaccttaaagggaccctcgaggacctatctctaaccacagcctccaggctgaacctttctcactgccttggggccctgacttcaccaggacccgtgcacggcttagcccctgcaggaagcccagggcgtcctgctggcctttggtgcagagtccttggatggagcagtggcagtggctgactgcagacggcgtggcctcatgcactttctgtgttaaatgcataggtggtggagtggagaagaaagtgacaggcagagaatgacagatgccccctccctggtctgctgcttctcaggggaaggtctgctggggtgactaggggaggaggaggcatggctctgaggcctccctgccggccactccaggcgctcccagccccctggcctccgggccccacaggtccctgagcaccttgctgggagatccctgtgtcctggcagtggtgacaaagctcctaaagcctacctgtcaaaactcccagctctgtgttcaagtatgtttttcaaaaaacattggaatgaaactggtagggtttgcatgatcctcgcagtggagaaaaacgttaatgacgttgctggttggagcctgtgagtgcagcaccccctgctcaggacacacaggcattggtgctgctgttgccagtcctgtcccagcctagctgccttagagaggtgctggagggtcaaactctgcaaaactgcagtttgccactggtgggtggctcaggactcaaggctagcccccagccccagtcctacaaaccttccccgtggacctgtcgtgatgccacccgtcacacccccaccccctgggagcgctgaggcccagtcctggctgccacactcgccatctccttgctccccctagccagagggaggcccagcacctcgtggtcgctttgggggttgggggccccaagtgcctgggggacatgagtttaagcagaaatggtgcacccgaggccccagccggccggccggtcccagcagcgcccccatttctcacgaaggctggcagctacaattcgggcgaagtccaccggcccatctgcacctgagcagcgatactggcccaacagactccaagtgcctggatttgcggtgctaaacctgaaggccttaccctgcagatgcagaggccgccgcggtagatcacagcaggcagaactccaggtcagcgctcttccctggcaccacaccagaccgggctgccgaccacctgggtttctgctgtgccacactgaagaacatttctccaggggacacaaacacttagcattctctactgaagttttctcttttacatttaacatcgaggtgtgcgattcatctggagtgcatacttctgtgcaccgtgagctggtgcccgcagtttgctggccgggggccgggtaggcaggcatggacaaggagtccagcacttgtggaggaagctttggcagctcactgaccaggcagcgggtgcccgacctgggtccctctccctgcgcgcccctcccccatttcccttcccacggtcctcactggtctgccacactgtcttagggcaatttccctttcctcctgctgctcgccccttgccttcacagagcgtgttgcatgtgcaaacctgggtctctgactgcagcccaccctgggacccagcaggagtaggtggtcattctccaggagcacgtgcggaggtctgtactctaccctttcatcctccgaggttaacaataataatagttattgttgctgttgttcatcattattgtaatgattaccattattatttgttattgttataaaaacactgaatgagattttcccatccataaagggtgtctggttgactgaaggtgaggaaggaggagtttcaggctaggaaatattctaattcctgctgtagcccagggtcagaggtcagggggagtcctcggccccagaggtgctgaatcaacccttcactcacagcaagttcccgtgtctctggggcgaatgcccaggggtttggttgctgggttacatggtccttaggcaggggaagcaaaactttacctctactttacctctctggctgggcctaaactttacctctctggctgggcctaagaggtaagtggacataaaacacattaacaggagaaaagcacacagatttgcacatgtaagtggaaccctgtaggaaaaagagatccgaagaagcagttaggcctgaacgcttatatactaggttggacaaagagtaagctgtgaaaacgtgcaagacaatggggtctgggatagggcagttcactgtggagaagtgacgaggcagatgagggttagtttaacgagatttgttcatacagattcccctcggccccaactccctgcctctgatggtaagaatggcttccttcctcctggtacagggagggcgcctttcccatgggagattcacctcctactttcaggaagaaaaaggggaggtcagggcatcttccttgtgtctgctgtttttcaagtgcctttagcttaaaataacccttatgctaaagtggcatattttggggtggcatattctgccacgcttcacttgcacgtttttgttgttgctgttttcttttttgaaactgccacactgttttccagagtggcagtacaatattaccttaccaccagcaatgtgtgagaaagcctgttccttcacagcctcacccgcatttgatgctgttcctatattttgttgaaggcatttgatggatgtgtcatgacgtctcactgtcattttaatttacactcccacaaaaggctaacgtcttctcatgtgccgacttgccatctgtacatcctgctcagtgaaatgctagttcatgtctgtgaactaagttttctgaaaaggaatgtggaaagtgactttatttcagtgaacagtttgtaaatggggaagttgcagccttcagtgtaaaaggaaagtaagttctagaaaactaagaaagggtttgggttctatggtaaaagtttctgtccaggtttccaactactttcatttatgtaaatgaaggactgaaacttgtgctgtcctgatcggtggatgtagctgaatcctgattagtcaatacaggtgaaccctgattgatgcagttgagtcctgattggccagggcaggggagttctgacttgttctttaagccttaagcagaagactgtcagaaatttcttataaatggctgtcaggggtccagggaagtggtgctcaggatacagttatcttggcactgacaacaggaactggtttggtttggttgtggaagggaggtcttgtgatacttttacaacatctttctgagaacacagagtacatgaaggctctgtcacccagctacggctccctggttccattttaactttgagcacctcagttagtctcctgggagtcattttttctttctgcagggggcatactttaacatgtctttcatcaattttgtaattggattttgaagaaaaataccgttgcactttgaggtttttttttttacacattcctgtagaatatatggtttgtaaatatattcttctgatctataatttgttttccttctcttaaaaggacctttcagctgagtgtggtggctcacgcctgtaatcccagcactttgggaggccaaggcaggcagatcacgaggtcaggagttcaagaccagcctgaccaatatggtgaaaccccgtctataccaaaaatacaaaaattagctgggagtggtggtgcgcacctgtagtcccaactacttgggaggctgaggcaggagaatcgcttgaacccagcaggaggaggttgcactgagccgagatttcatcactgcactccagcctgggcgacagagccagactccatctcgaaaaaaaaaaaaaaaaagaggacctttcacagagcctggggttttaattttgatgacttccaatttacccatctctctttatgaatcatgcttttgatgtcaagtataaaatctccttttttagcctagatcccaattttctctaagaattttttttcctaaaattttatagttttacattttacattgaaatgtgtgatccatttggagttaatgtttgtatgaggtgtgagggtagaacccccacaatttatccattaagaaaggtgaggagactttatttctcataaggattacagccttcaaggtggccatcccagccaagggaccagaaacaggcacttcgaaggaggaggggttagggtagcagctttatgctgggcagataggctaaacatacatattcaacaggttataggaggtgctatgaatattcatgaaggtggtcctgacacatgcatattgaacagacatgcatgtagcatatgacccatgttcactttggggtggagacttaacatttaaatgtattacagttaggtcctatatgtcaacaggtcttttcagggcatgaagtcacacaagtgtgcagcctctgtaaaccagccaaagacaatccatggttggtggtcttatcaggaagttatggctggtagagcaggggtttagtaagtcagtgggtggtggagctggaaattgttttactcttgtctatcttgaggccagtggttgtttagctgctagagaaaaagaaaagccttgtggtccttagaacacagtttattctttaagcatagggttaatgacttaacccttgcctggcatggccttaggtcctgtttataatttggcattttattgccacagagtctgttctgtcagtcttctgatctctgtgttaacattaatgctggtctaaaccccaaaaggcagggggtataatgaggcgtgtttgacctcccaccccatcatgactagaactaaacttttaagattttcctgaggtccccttggccaagagggggtccattcatttggtgggggcctgggattctaaagttgacagtgtctaggtcaagggttttgttttgcgtgcttgtttgctgtgcctgtgatgtgcaattgccctactcccatttgatggaaaggctacctttcctcccacaaggtgcttttgcatgcttgtcaaacaccagctgggtgcatttgttttggtctcttttctgttctgtagatcatctccctctgtccataccacactgtctttactagctatttaacgtgttgaaataggggtaacttaatacttgttttaaattcttcatttaacatttcatcatcaacatttatctcatctaaaacaaaacaaattcacacagtgtacggtgtggatgtactggagtttatttaacccgacccctcttaatcaatggctattatcccccaccccagttttttttgttattatagtaaataatgctgaaatatttttaaaagattttttaaagtttatttttaattgacaaatcataattgtatatattcatgggatacaatgtgatgttttgatatatgtatacattggtggaacaattactttaagctaattaagatatccatcaccaacacatctatttttttgtggtgagattatttaaaatctactatttaaggaattttgacatataaaatgcattaactacagtcaccgtgccatgtggatcactaaaacatattcctcttgtctaactgaatccttgtaccctttgactaacatcttccccctcctgcccttcccccggcctcaagtagccaccgttctactctccgtttctatgagttcaactattttcagattccacatacaggagagaccaggtggtatttgtttctgtgcctggcttacttttcttagtacaatgacctccacgttcatccatgttgtcgccaatggcaggatttccttttattcaaaggcgggacagtaccccgtggtgtacatacaccacattttctttatccgttcagccactagtagatgcttccatatcttggctaggttgcttccgtatcttggctactgtgaatgaaatcaatattcttatcttatgcataagcgatccccacactcatttgttatcttttgactttgcttgtgtattttgttcaaactttatgttgtcaagccgatcaatcatttccttgatggcttctgggtttatttaatgctttagaaaggcttccccattccgaaaagacagaataaaagcgattcacccatgttctccctttcacggtttcaacttcactgtctctcccgccgccagagcccagcaaaactttctaatccgcgaggagcccgggaccccgctgcgctgggaagccgaggcagggcgccggcctgcgggggtcttcggaaacgttcccggttcccgcggaagatcgcccggcccggagccgcgtgggctgtctgtcctcgcaggtagcagtcactcggagcagaacggtagttaggaaaaattttcaagtctccttcggctgcggggtcgcgccattccaggcggtgccaactgggagctccttcacccgccccaggccgagaaacgcgatcccagttggtcagggactaggagaggcctcgcccgccggagatgcggatccgatccgcggccgctggcgccggctgtcgggcgccacctggctgcactgttaaggttttctctccggcgctctggcgaagccggcaagaaaggggatttggccacagggcgcggtgcagagttccaggggactggcagcgctggcaggatgagcccggctttgctgggtgtactcttcgtcctttcgtcggagattaaacctgagggtcagcgttgtaggcgcgctcttgagctcggagtgctgtggcctgagcgggtcaattagtacacgcgggaatcgctgggccttccgagagtgtgaacgggggatggggtatcccgcccggacgctgactggcgtggggcccggtcctcaggccttccattacacccattatctccaagccccgacccggaggtgaggaccggcccggctgttccaggaggactgcgaagggtagcatgggcccgtccgtggccacgcgtgggtcatggtcatccgacttgagcttcacacctttttctgagtcttgttttggaggtggagactggcttgggcagtacgagaaaaacggggaaggcgcagtggatttagccgtggcccgcataatgggatcttgtggttggactttggggccccaccctccccaccggggaagagcgtatagcctctggctccgagatagaggggcgaccagatgtcccatggatgatctttgttagagttgctgggtcgatcagcctcatttctgcagttttgatgtggcctcagaaagctgatcagatcgaccagcagcccaaccaagcagatgggcaactagaatttgggagaggagaagggggaaaggcgaggagagaagggcgtcgggggaggcctgtggggaggtaagggtagggggatgggggaacctgagatttatatagcaatagtaattgttataagcaagtattataaacaaataataatttatttacatttaaaaactatgtcaatataaataatatacatttatagaattataagtataaattatactttataaataataaatctacataaatagtgattagacataaacagttatacttctgaagaggacgcaggaggggctttctgtctgcagaaatttctaaatgcccctggggaggctgaggtaggtcgaccccggtgaattttgaagtccactctgggtggggagctggcccgggaggcgctggggagtctgtcccctgctcggcagctgtccctggcctagggcgctcctccccaaattttccaaggcttcttttggctgccagggatctcacggttccactcacgcctgccagggaaccccgaggtgggaatgcgacccgaggtggaccctgacgaggcctggcgtcctacccgcccgcccgcgatccggatccgtccggctggctttcacgctggttgtctagcgacacctggcggtcacctttatatatagcaagctctaccagcgggggcgacgtgggattgggtggccggatggttaaacgggatattaggttatggtggggggtgggggggcgtcctgaggtttatagtagtagtagtaataatattctttttattatgtaatttataaatataaattgtcataaatacacaaataatatatacttatgtagatactataaatgtcatagtacaaatatgcgtaatatatagattatatattttagtaaatatttatgtataaatattaaatcagtaattataattatttggtccttgctgggattcatcattattgtaattattaccattattataaatagtaattgtagtagtagtagtaatagtagcagctttttttttttttttttaaatagcaacactgaataaactgtctctgtcaaagaaaggtgatcaagtgactggagataataaagaagggtttcagtccgtgggatttaaaaaatccacccaagagcctggtgacgctctgacccacagtctgtgaagcagccagctggaaactgcatacagcaaccctaatggtcaggactgcactgacggcttccctcctttttgcccttgcttccaacttaggaccaacagggagaaccaaataggcaccctcttaccagtcaggtaggatcccctgactggatacaggagatggaaataaattgtttaggcagatagggcaaaagagtccttggcagaactctaacaaaaaacatcccaagaaatcatttctttctaacaaagagcagcctgaaagatggagctgcaaacatagatgaggaagctggaagcttgcaggggggtgggggaggcctgcagctgcactgataaaagggactacctggcgccaggcatgtccaccatggggggttcaccttccctaattattttttgttgttgttaacacatgcacagtaagaaagaaataagcaacatggagtagctacccacgtgcgtaataaaagattggtgtgggggcgtccagagattcgtgccctatgcagatggcacacctggtcctgttttttcgcacccgatgtagatcagacactgctccccactagctcatctataaaaatctttgcattccactgtgcatcagcgacctatttttccgggacccctctctgtagcagagagctattctctttctttcacgtattaaatttccactcttaacctcaccctttgtgtgtcctcgcccttgatctctgtggctgtgagacaatgaaccttgggtgtcaccccagacaatgaggccacttcactagcagccgcctctggtggctggcaaccccatcaggactcctcttccccttttccaccgcagatttcccattcctctccctgcctttgagtctctgccaaacattattgagctgcatgaaagaaccttaaatgcatattactaactgaaagaaactgatctgaaaaggctgcatactgtaagattccaactctgtcacattctggaaaaggcacaaccatggagacagtaagaagagcagtggttggcaggggttgggggagagagggatgaacaggcagagcacaggggatttgccggactgtgaaactactctgtatgatatgacagtggtggatatggcattagacatctgttcaaacccacagaatgtactgaggactaaactgacattttttctctcttgcccaaattcctatctaaggggcctggggagtcataccctagaaactgacatctcaacagatgggctttatttaaccctatatataacacagctttctttcccacctgactctcgtataacatcatatgacagataaagaaggaaataaaaatattttaccccaaaataggattttttttgtgtattttgaaatggccctgcaaagctgtctcttgtggggaaaatttgcatccgtaaagaatctctattaccataactagctcttttcccttccaggccctcccaatcctctagagattagctgaaagtctagcaccttttaaaagtctgaataggaaatattggccatctattgtctctaagggcgacctccatgagacttcatctacatggtaagaaccttggtctccacaaccccttatcttgacccagatactcctttgtattgattgcaggtttttagataataactgtttcaatgaattgccaatcagaaaatctttgaatccacctatgacctggaagccttcctcccaccgacccccttcgagctgtcccacctttctggactgaagcaatgtacatctcacatgtactgattaatgactcatgtctccttaaagcgtataaaaccaaactgtaaaacaactgctttgggcacatgttctcagggcctcttgagactgactgtaccttgggtcactcacatttggctcagaataaatctcttcaaatattttacagagtttggctcttttcactgacaatacaacaccaagagtgaccctaatgtgaaccacagactttgggtgataatgatgtgttggtgtgggtttagcagtagtaacaaatgcgccctgctgatgtgggacatggacagtagggcaggctgtgcatgtgtgtgtgtgtatgtgtgtgtgtgtgtgtgcgcacgtgagcacatgcgggccggtgaggggtgtatatgagagctctctgcacgctcagctcaattttgctgtgtaagtatagaaaaaatctttcctccacccatctaaggtttattgccttggccccacaaatttagaccaatgaaagccaggttaacaagagaaaacaacgcatttattaattcatgcatcgcaaatacacatgggagagctcagtgataagtaataactcaaaaaggtggttagaacttgggcttattagcatcttaatgagagagcaatgtatttgtagagaagtggaaagacaaaggaaggggaccttgagcttctttggataacaagttgtgggaaggtagatctatgggggaagctgacagataaggttgatttggtgtgcttgtgatgttgatttttctggtgctacctctgggctggtaagagccatcctgcccttctggtagatggggacagggcagagagtttgtcctgtgtctacttggtctcagttgtcttcagctcaaaataatctttgtatcagagtggcatattttgggatggcatactctaagccccttcagctgtgaattcaaaacaactctaaaaagtcaattaaaaattgtattcctataacatggcccttgctggtggggctcaggacacaccaccccaaaatatgacagtacaaaaccagatatgtgaacacaaaatatacttcttaggcaaattttgatcttgttattctaagaaattgcagacacaggagtagctctgaaaaactgcccttttgtaaaagaaatttataactataaaagaaatctacattagtgaagtatctgtatcaggaagagggctggttccagacaacttctatcaccccagagacttttctctgcagaacaagacaccttttattcaccagacattgcctcccctcaccctcccagaacttgtgcccatcctcagcaagccccaagcccctgttcctttctgtaactcaggacactatctaagcttcattcatctggcccttctcctagtctatagtttgggggactcctgtgcatatagatgtaattaaagtggtgtttctcctattagcttttcttatgtcaatttaattcctagcccagccaaagaacctagaaggggaaggggaaggggaagccatttttccctccacgacctgcttttcaagatcccagtttgttggaaccacttcagagttaaccctctgtaaatacttgtcagtcctcatcttttcagtgttttcacctgacattcactctttattgcactcttacgtctcccaacaggttgctcaagaaactctcccttgctgtggacactgctgacttctgtaaaatacatttacaggaggccattagtttggactgagcttctgcactaggcccaacagactgagacggagcatggacccctattagaggcctgctgggcctcctccagcatggaaacaaaggaaaatcttgatttccttcaagggaaattccaggtacctagctggccttgagaagtaaatgagccacctgataagcaagaagggaataatagcttcaagtaacaggcactcaagtaagtcagagccacaaggtgtttggtcccctattgaaactaaagattacatcttagcatatgtccatgaatggtttttcagaaacccggacccacgtcagatggaaaatactgaccatcatcacagagacctcagatgtcggggagctgagggctgcactctgacggctgctctttgttgtaaatttctttctcaggggcctggagagagtcatgcccacaggccagaccttaacattcctttctgctgaccccaagttttcgacaaagcctggcttccttaaccaattgcaatcaaagaatcctgaagccgcctatgacctgtaagccccttgcttcaagagcttccgcctttttgggccaaaccaatgtataccctctgcattgatttatggtttccctgtaacttctgctttcctgaattgttcccctgcctttaaaatcccttgcttgtaagccatccaggaggttgggtctgaagtgtaagctgccccattctccttgcttggtgtcctgcaagttaacaccctcctttctcctgctgcaaacctccgtgtgggtgtttggttttaccacacggggcaagcagacccaggttcagttcagtaacaagaccggactggaatggagttccttgcgctaaagttccacttttccaaaccaaaactaagttgtttatctgaccttctgagaagtcaggacacagagagataaaaggcaaatctccaacaggccaggtttagccagagtgataagcagtccttcccctctgctttaatgtttacaaggaaagtaactttgcaaccaatctatgctttgttctttgcttccacttcagccttttctatccataaagcccatctcccccactctgcttggaggaacgctcagtctgttttatggaatgaagtgttgcctgattctagaatagcaaataaagccaattaggatctttaaactaaatctgttgtacttttgtcttttgacagttccatgatggaaaatctaatggccactttccattaccacatcccaggagcagtccaggtaagtggctccttttgtttctggggtccatctcgctcctggctcttgacgccgatgcttctccttctcctcctgcatttcttgtgctcctccccaaggtttgccagcgcgctcacaacccttgcttgggatttaaaatctgaagtgcgtcataactcacccctggactctgttattcttttattggtatgccagaaaaaaagaaccccaagctctctgggtgaccaaattgatatttaaagcattaattattaactctattcttacaacctccagattttatctccactcagaattatatgtacagctgcctagctgatttccagactgaaatgcctctttgacattacagattaaaactgatcccactctattgtccaggtcatcttccttgacttggctgtgacccagacttactgtctaaataaatggtgtgacggctcacctagggaccccaatccagactctaggagagtttcttcagcctgtatccccccatgtcatgaataatccattaccgagtcctgttcgttcttcctatacatctctccaaaggcttccctccatttccacaatgaccccaactgtttcaccactcgctcctcaaagaacctctggatttgtttctagcttttggctatgaggaataagcctgctgagaacattcagctccaggattttgtgtgaatgtaagtgctttagtggtggggcgggaccctgcaggccatccctgggttggatgattctctagagggacccagagaactccaccaagctgacctaaggccctgaaagtcaaacagataccgcatggcccaatgcctgcaccatagctcacttgttggaataaactgcctaagaaaaatgggggtacgtggttacattatcagaggcatcccaggtggatcctggagacatggacagtacccgtagtcacgaagctgacagctggaagaagcccatctggttcaacccctgtctggcatattccttccttctccatcctcactttctacccctcacagggacagagaatttacagcttaccgagccaggccattgcacttttggacaactctactaaatggattttcctcatgccattgcataactgctacctgccaccagagcctcagaaatacatggttttccatcaagcactcatggaacatgtaactgtgggcgcttctagggcggttcatgatggatcctccaagatcaactaaatataaaacaagctcccaggtaacagaaccatttcagctgttaaataaaatcatctgtattaacctagtttaattatgagggacatctctcccaacataatatatatatatataataaatatatacatatataatatataataaataaatatatataataaatatattatatatatatatatatatattttttttttttgagacagggtctcactctgtcacccaggctggagtgcagtggtgccatcacagctcactgcagcctcaacctcctgggctcaagcaatcctcccacctcagcttcctgagtagctgggactatagatgaatgccattatgcccggctaattttttaaaaactttttgtagaggcagggtttcgccatgtttcccaggctggtctccaacactagggctcaagcaatttgcctgccttggcctcccaaagtattgaaattacagcatgagccactgtgcctccaacatactcataatttttttaaaagaatagttggtatttgggggctgggtacagtggctcacacctgtaatcccagcactttgggaggcagaggcaggtggatcacttcaggtcagggtagttcgagaccagcctgggcaacatggtgaaacccatctctactaaaagtacaaaaattagccaggcgtggcacacacctgtagtcccagctacttgggaggctgaggcgagtggattgcttgaacccgggagtcagaagttgcagtgagtggagatcgtgccactgcactccagcctgggtgacagagcaagactccataaaaaataaatagttggtatttgagcctttctttctgaaaatgattgataatggccccattcatctgttgaggttttatatgaaaacaaaaccttataccgttgtgtggagaaaggtgctgactgtcctctttgtggtggggtgaatatggcttcagcacacccagcagctgttttgggttctcaagaagggaggcccaaagtagtccaatcgtaatagggtctctcagaaacccagcccagctactcccctccctcaagggagtttgtgaccttgctactcacagcgtggtccatgcatcagcagcactggggtcacctgaagtttgtgtgaaatgtggcattccaggcctgctgcaccacgtgcatcaaagcacacacgttcttcctattgctgagagggaggagggacggcagcacaggagcaaagccatcactgtgattgcggttagggacagtgccagagcacccagccccgagccccaccaccaccaccccttgtccttaattacagaattcacttgaaattaaaaatccccgctccctaaatacccaccctctcctctggctttctttttagctgaggcagctgctctcgcctcttctttcactcgctcctggcagcacagcaatctctgcaagttacttggaccctcaggactccttgttcaagtgcaatggaggaccatgcagatggcagggaaaaccaaagaaagctcaggtggcccatcatggctgtcatcggtggaagaacgtctctatttaacactgaaccttagtaatgacatgctctccccttgtcctggaccttcattttgaaatagagcattcgggtgggaggggaaccacgggggcatttcaatcctgaacctgctctgggcggtggctctagcctttgggattttgtgctcatttacagttttttgagatggaatcttgctctgtctcccaggctggagtgcagtggtataatcttggctcagtgcaacctccatctcctgggttcaagcaattctcctgcctcagcttcctgagtagctgggattacaggttcacgccaccatgcccagctaatttttgtatttttagtagagatggggtttcaccatgttggccgggctggtctcaaactcttgacctcaagtgatccacctgtctcggcctcccgaagtgttgggattacaggcgtgagccaccacgcctggtctgtcctcatttacttaaagagccattactcacccccaattccccatagatagtggccaacttctttgaaatctggagacattttcaaatgctcaacccttttttcagcaattctatctgtttctaaaataagtgtcactcaggatggatatgcttttagagaaacactgtgacaaagaccctttgctccagaggaaggacctgcagtggccccaggctgtggctccagcatcacttgagacagtgtgaacatttggacacaattaaaatgaggacacttaatcaaagaacacacttacaaaggaaaggggcaggaaagccaggaggcagcaggtgtgggaccccacatgggacaggcagctgtgtgttgttggtaccaccttcctgccatggctttcctacaccagcagagagaaagcccatttctgctctctgctgcaagactctctggatggaaggcccagttccacaggaaagaaatcctggtggctgaggcgtgcctgtgcatagcctggatggctcggcctgtggccggcaggcacccagggcccctggtgggggtctcacccgcttgggatggcctcagctcccaggctgcagccaccactgccatttcaaaggtgagaaggaactgtctgtgtgggcctctcatcccgcaaagtgagggaggcgggagctgggtggtgcagggaattaggaaaggcaaacctgggacgtgctgtgccctgcagtgcagtttccagaggggagcagcccggggtggcagacgtttgcatttggatgttagaaatgctcttcctggctgggcatagtggctcatgcctgtaatcccagcactttgggaggccaaggcaggcagatcatgaggtcaggagagcgagacaatcctggctaacatggtgaaacgccatctctactaaaaataaaaaaaattagccagacgtggtggcgggcacctgtagtcccagctactcgggaggctgaggcaggagaatggcgtgaacccaggaggtggagcttgcagtgagctgagatcgcgccactgcactccagcctgggtgacagagcgagactccgtctcaaaaaaaaaaaaaagacaaatgctcttcctgacttttcagagctgactgaagcccccgtttcttggcctgtgtcttttccttgccttggggtccacattaaccaactatattcaatcaacaagcttaacactgagaatcaagagaagcccaggatctggggagcccgggacccccttcatcatccactgtgcttgggatggggctcctcttgttctcctgccccaaaggagctggcacaccaagcgatgcttccaattgtccactgcctttatgggaagggacagcggtctctccttggtgccagtgttagaaggaagaattgatgctcactcggtcctgctgtgtgtgggagtctcctctgcaccccaccctatcttgtcactcgtcaccactgggttgagcaataccagactttgtttccaggctttgtttcctggcccttgacaataaacagaacagtgtccctcagcctttcacaccacatagacccctcaggatgaggggctgctcaagcagctcccactgatgctgggccttgggaagagggggccagtggggagggccctcccctgagctgagaggtccctttataaaggcaagtccaagccccagagatttgggggtcagcaggggagagagcagggctgaaggcgtagagggggcaccctgcactttatacctggggcaatgcaacaacaaaggtgccaggtatgtggacacacacctagaggaagagtgctgtgcaccctcaaagcctggtctgaggatcagcaaaccagcccctctgggaaggttgttggaaaggccaactctcaagcccctccccacccctgatgcaccagaaccttcagtctgacctagccctgggtgactcccctgctcccgaggtctgggacgagctgcctgcagcactggctctcaatctgcctgattgtcagcaccatctggagagccagagaaattctgaaaagacagatctctgggcgcttccatccctgggattgtgactcagtaagtaaggggtgaagcacaataattcatatctatgtttttaaagctcctccagcattctggatgcttagccagcctggggaccctctctctgctcttcgggtatcttacaggtaagaaagatgtcattgtaagcttttacccttggaaacacattcattccaaacatatcaaaagaacttattaggccgtgtgtggtggcttatgcctgtaatcccagagctttgggaggcccaggtgggcggatcgcttgagcccaggaatttgagaacagcctggacctccttgacttctggggagtttatgagggacctggacactgtcagagtggttttttgtttccctttgtgtacagttttgagttcattgtttatgtattagggtttggaataggatcatataaatatttcaggtcctaaaatagctgtgacagtgtcactaatctgcccctgagctgaacatccacccctccgccgccatttaatcctccagtcatgtgagggaggatgggagtctgtgtgaacgtcattctcactcgccttcaaagatcatatctgcctgtctcatctgtcaagaacgtagagtttgttgtgatggtgtattcaaaatagacgaaacgtgtggtcattgtacttggcaaacagcttttcacgtcaggatgtttctgcccccggctcagggctggtccgactgtgtgaagaatgtggctcagtgcaggtgcccagtctgccaccctcagtcccgcagctgcagtgttagaataactgtgctgtgggcacccagcgttggtgacatggggaatgtggaataatgaatacttaattcacatgtgcttatagaaaaaactttatacaataaaaataaccaattgttatatttacatctttttctgtcactatatataaaaggaatcaagaattttcatgcagcttccgggtattcttgagactggtatatcatttctttttgaaaagtgcattattgcataacaccacctagataaatatatttttatgtatttataagtatattttagctcaaaaatatcaatagtatacatagcttatagcacagtttgggaaatgctgatgtatatggtaataatgcgttgtttgggatgatttaaaattatatcaggatattaggagcccaatatagtgatccagattgagatcctcttgtctagtattctttaaaatggcaaaacatcaaatctagaaaatagataagaaatgaattttaagataaaagtacaacagattttctatttttacaaaaatcattattgattttcaaaaatatattttagaattcaagctgttaatttaaaaagtgcttatttcatcatataacgaacaaaactggatataagaaaaaacgcctcgtcttgctgtctccaaatcttgcagcttttcaaagtttcagaattttgtaaaatattttgaatagcccagactttctgaaaatcggcgtagcctttcaaagtattagaattgagaagcttttaaatgccaatcttattttataaagtgttgacttttcactgtagactaatagcgaacagtttgtaaagaaatgtaaataaaaaatgtaaataaataaaataggcttattagttttcaaaaaatttatttaaaaggaaggggcaatgttgattggagtgaggaagtatttgaaaatgtattttgtgaaagaaatcaacgcacacgcacacacacatgcctcaaaagcgaaactccaacaatgcagctgctgttcctttgcagcaatatttatctcaccttgagtgagtgagggccatgctgcttggaagcgtaataacttaaacaccttgcctatgtctagggattaaaaactaagctctactcagctcatgtaatgcccctgacctccaccagagagagattcttggttattccttgtgggcaaatatgtccatggatcagtggatcagggactgttgaatcagatatgtctccctctctacatgtcacggtttgtagagatcaaaaatttccctgaaaacacccaggtttatgaagccaggtgatcagccagttctgaggcctaactagggaggccagaatcctgcttgcaggacagggctgggttggggatgtctgtggtgatgtcatctccagctgtgagctccagggcaatgctgtctgggatgaaggtctggggcaccctgagctcctggagaaacgggtgcagttaagagctctatgaagattgtatgtggtggcaacgctgctgggataccccgtgggtagcctagagaagaagtactgtgtcccattgcaggtgaaggtgaattaaggcagagaggctattgaaataggcactgaacagaacatgatagccgaatctataacagcaaaatatttaccagttgttgattggatggggtcagtaagttccataatactgggtgttgggtatggggtcttaatgaaaggattacaatgttaaggttgtagtaatccactgtgaagcaccatttatttttttccaggcttaagcacaggcaagactgagctgtcaaatggagaagcagtagagagaatcacccttttattaattaggttttatatattaagttttaaacttgaaggtcctgtacatctgaattgtgtctctcccaaaattacatactgaagcccttaccccagtacctcagaatgtgcctgaatttacagatacagcctttaaagggagtggttaagttaaagtgagaccattaaggtgggccctaatccaacatgacaggtgtcgctataaaagaagaaatctggagacataaagagacctcagtgctgggtgtgctcataggaaaggtcatcccaggtcgggagagaggcctcagagaaaccaaataccccgcaccttggtcttggaattccagcctccagaacagtgagaaaataaatttctattgttaaagtcacccagtgtctggtagccctagcagactaacacatcttgctataacttacgtagagtcatattaactattttaactggggacctgcaaggtccaatttacctcataattatagcaatattaactatttttactggggacctccaaggtccaagccaatttgtaggtgccaaagacttaattgaatcatacatattactcattgtgttagagcatgttttagggcaatgagtattatgcttatgagaaatttaggcaaagctacagttaaaataaagcatggctatttttcctctatagttattttgccaggatcacaggcattgcagtgtttaaatttagtgagattcccaggtataactgtaatttgagtcccagcattgactaagttcatgaagctttgtcaattggtgcatttgttaatctggagcccatgctgcacaggcacaaaagccaatcacggccccttttatctctttgttatataaatccttatagtaaattttgtgtttccaattgggtcaagttatggacctttgttttattacatatttatgttactgggaaggggcactgttccagaccccaagagagaattcttggatctcgtgcaagaaagaattcgaggcaaatccataaagtgaaagcaagtttattagagaaagtaaaggaataaaacaatggcgactccagtggccaagcacggtggctcatacctgtaatcccagcactttgggaggctgaggaggcaggcggatcacctgaagttgggagtttgagaccagcctgatcaacatggagaaaccccgtctctaccaaaaatattaaaattagctgggtgtggtggcaggcacctgtattcccagctactcaggagtctgaggcaggagaagcacttgaacccaggagatggaggctgcagtgagctgagatcgcaccattgcactccagcctgggcaacaagagtgaaactctgtctcaataataataataacaataataataaaagaatggccactccataggcagagcagtggaatggggtgctcaactgcttgtacttattgttactttttgcttatataccaaacaaggggtgtattatccatgagttttccaggaaaggtgtgggcaattcctggaattgagtgttcctcccccttttagacggtataggataacttcctgacgttgccatggcattcataaactctcatggtgctggtgagagtgtcttttagcatgctaatgcatcataattagcgtgtaatgagcaatgaggacaaccagatgccactttcatcaccatcttggttgtggctggcttctttaccgcaacctgttttatcagcaaggtctttgtgacctgtatcttgtgctgacctcctatctcatcctgtgacttagaacgcctactttcctgggaacgcagcccagtaggcctcagccttattcaagattctccaggcttgagggtggagccttatttacccagcccctattcaagatggagttgctctggttcaaaaacctctggcatttatattaaaatatgtagaatatatgaaacattacatgcaggtaatttttaatattcactttattttcatccctggtgtctaggcctgccctctcccccatttctgggcttctggctgcccgaagccgaggttttgagttactgtctctggctgacaactcaaagtgtggaccttctaggggcttgtaggaggcagggtgtggggtggggatcacaggcagcccagcctctttcccaggctctccaatcccctctaagggggtgggatttgcccttggaacctagacgccccctttccggctgcacacaccctgcctgctgtttcctctagaaatgcaaaactccatccctgcacactcctagatccctgccgcggaagaaatctttgaaaaatgaagtggcttcctttcaggacaatatcaccatttatagtttcctgctatttacatcatatacaattttatctgagttgggcagagtgcacatgacactaaaaaccaatgcaaaagagaatcagtcacaagattttttatcacagtatcaaccaaaatgctcaatcttacatgaaaaagatattttcccactttgttctttcataactgtgacttcttttcctctgggtgtatatgtcacacatttgtatgcattttcaaatgggctacaatttgtaattccagcttggcttgaaaatgcaattccatatctagacatgtagttaggtaatatttttcaggaaatagaatgtatttactacctgtatccaacgatttcacccatgttcattcatgggcaatcctgctgccttgtgcgggaaaccaagatggatcaggggcgagtggtgcccttaaagcagagacaagctccaattattacaatatttcaagtcctcaggtctttgtatacaaaataatttaggacataattactttttagtttaaatagccaaactttttacatgtgctattttttaaaactaaattttattgaggtattgatatagaaaagagacagggaaatactgcatagaagagggcggctccccagcaaaggccccaccctcaagcctggagacccatggccctaactgggaacaggcatttctgttttcgtacccaaaaagttgccctttggcccaccacacccccgtatcctgtacccatataaaccccaaaccccaggctccaggagcagatgaagagatgaagagaaaagcagtcaaacagcagaacggcatggcagagaaagtgagaagatgaggaacacctgaacgctgagaggagttcagctgcgggtggtaagagaggagtttggccgtccagtggccaaactccaggggaagatcgtcttcgcactccctccccacttccagctccccatgcatcctactgagagccacttctacccctcagtgaaacccctgcatttatccttcaagtctgtgtgtgacctgattcttccaggatcatggacaagagcttgggatacagaaagctgtcacaatgaccctctgcctttgcagaaaggctgagggtccactgagctagttaacactcaagccatccacagatgccaaggctaaaagagcacactgtagcacacacccacttgggctcctgcacctgtccctctgcgtgatccccctcccgtaaggggtttgaacaggcagcgagccgaacccttgtcacacgtcctgtgagaggggccagggaacactcccgtttcagtgtaatttgtgtttactaaaattaaaatgcagtttgatgagttataagttgtttttaacattatagcaaaatttgttaaatacacaataaaaataggtttaagaggcacagtttgactataagcatcttagtacatggaatggttaacagttgttaaaatatcagtttcaccaaattgggaaaatatccagtgtgactggaataggagcaattccaaattcgagagtatttattaaatattctattactcattagaaatcgaggtatcccaatgtgaaatcactgtgacctaaagcaagcaactcatgtcaccttggaatcatgatttcttcttccggatagataaggggattagactaaaagatgtcttaggtccctacagttcaaaagtactacgacttccagtccatgcctgcagaacaccgactcctgcccctccctcttggaaactctcctcctgcacctcccatccctccacaccctcctgcttttcctgttgctcttttctgatctccagcggcctctttctaaatgctggcattccccaggctttaccctgggcctctgatcctgcactgcctgctcttcacagctgcagcagctgcctgcctgcttgtaacttccaggtctgtatgttgctgccccacatcctggccccagcatcccgaaagcacattggatggctgctggacatttgtccatgggtgtccacaggcacatccaactccccatgcccagattcccctccctcacacctcaaatgctgcttcttttcccattttatttcaataaaaagcaccagcactcattttaacctcaaaatcactgagtgatttaatattcctatggcatagtaatctatgtattggacatgagaaaatggacgcttagggaagtgaaggaacatgtctaaggctacatagccagtcagtggtggagtctggatttgaactcaggtgtgtctgacttgaaggctagggccccgaaccctgtcatccaccctcatgtgcctcaggcgggaacgtgggtgctgtcctggatgcctcctccctgtcaccacgcacggccactccgccaggactcacaggcacacagggctcgcagatcagctcctcgcacctctggcccagcttggtcaatccacccccatccttgcttcatccctaacacagccatcttccatcttcctctcttcaagccatacttcacatttagaaaaggtgcttttgctacagtacaggtgacaccactccctggcttacaaggtgctggtggcaaccagaagctcccgggataggagcaagcctcgcactcacaaaagcctctgtctgcagctccagcatgggggtggtcctcactagccactatttcatatttgtgaacttttctgcttgttaaaatgtatttttaacccccgaatcaatactcgtgttgctttcacagtcacaggaaaacatgtgcagagtagggcaacaatttgagccatcggcctcccagcggaggccatgcagggccccacgctgccttcttgttcctactctcaacctgcaaaccagtcttctcatggtctctatagtaccacttcttttgcagttttgagcttcttgttgttgatttcactgtttgaaacggcctccaagcataatgctgaagcgctgtctagtgtccttatgagcaagaaggctgtaatgtgccttacagagaaaacgcttgttagccaagcttggttcaggtgtgggttctagtgctgcgaactgtgagttcaacgctaatgacaaacactacagtgcatccagaaagaggaaggggagcttcaccaacctgtacacgaggctgcttgggaaagtgcaaaactaatatcccctagagtgtggcaaaaccatggaaaccatagaaaagcagctacatttgtgacttcatgagatgatgaccaatgaaagcacagcgggcagcactgttgtgaggagagccaaaaagaggccttagctaatgctgcctggctggcacctttcaaaaggcagcatggcatggaaagtgttagcttttcaggagtggcagctctgtagatcaggaagtactctacgggaaaagggtatgtggagagcagttttcaacactgatgggactgccttgttttacagggatgttggaaaatgaacccatggaacatgaatggtgccttggcagttgaaaatattgcaaccagaggcttgcaggaaccttaccctgtgtttccccagaagcaatacttcaggacccaaggcgagtttacagaacataaccacagcaaatcaccagataggccgcgctcctcaatctcctgccgcgacggctgcagctcactgaaccacgattgcctgaagacgcttttcctagggtgccctctcccgtctgtctcatcaccgaggctcatcccttaaacctcagccccagtcatccacaggatatgtctctggaccctgcctccagggcactgagaggtttcttatatagcacttttatttttaaatttgacatacagtacccacaccatattggattgatgctatgtttctatgttatgttatctagcaaagtgcctgactcatagagacgagcagaaaatatttgctgaaagaagcataaagtttaacagtatttattcaatttgttcattcttcctcactgaagtttcttgggccttacatttttaattgataaaatagtcttaaattaacattcaaataatagctcgttccctgaaataatctagagaagccctgttccctctctttttgagctacctataataacattctgctgagccaacatggagcagttctcctggcacatcctgcctggggaaaccgtggcagtgactgtcattaatgggagtcacagagcccctccagcctctagactatgctgtcaagtctgtatggtgaaggccctgagtcaccacaacactgaaattgtttgaggtgctctggacccaggaaacactgcctggccatggaacactctagcggaggagaggtgaggattacccctggccatggagcactctggtggaggggaggtgacggattatccctggccatggagcactctagtggaggggaggtgacggattacctcctggatcatggccatatgaaagagaaaggtgtggggctctagtaaaccactaagttaactgaaactgggaaacagccaggttggcggaacagggacctaacccagtctgcaacccttttgtgtgaaaaaccacagccgttattcttgcaacttcagaagtgaaaaggcgtgtgggttacaagacagctaaaagcagcagggcgtttccctcgggcaccagaagaggaaaggtctggcagttaaaattattccaacatattcttagcatatagcacaagctcacctgcacatagcgccgtccagcacaaccttagaaaacttccctccagccctttatctttgcagacagccccttctctgctgtgctgcatgttgcattcttgcaatgtattttcatagtttctgtaataaatttgcctttctttactcacggttgtcttggtaaatacctttactacccacgacaaccctggcccagcagtcgcacccacgacaaaaggggcccatgaggaattctgccaggtgatgtctgcaatacagagcccaggctctaaccggaggcagccaagctccagccattccatcttgagcttctaccataagaggagcaacccaggacatcagtagcctgggaaggagagaatggcattgtccacagggacctaaagccagaacacctgtttctggctacttgacctgaacatcaaggttgcagactttggcttcagcaactgttggcaacaagctgaacaccctctggggcagcccccttgtgcgatctgggaactctcctaagtccataggcacactggtccacagtggtggtgtggaacctggagtcaccctctgtagcctggacaccgggtccctgccttttaacggacacaacttcaggaagctgcagcaatggatcctgacaggaatgaaacacaacacctcttacatatgtgtggagggtgcaaacccactgaaaacatttctcatcctcaactccagcaagaggggcacctcagaaaaacccacatttgccccatggaggaacaccagcagagtttcagcatgagaaggaaccagagccacccggatgctgagctctccctaaccccaagagtcctggcaaactgagctcatgttgtccatggcttgtgagtgagaccagatccaggactcgctgatggaccaccgaactgaacctgggctgtatgcaaacatcccagcatggagggctccagcatcacagtgaaggccctgccttcggctgatcccaccaccatctgcaatcctttccctttctgcatgacacagcctagggtctctgtgaatccaaagctgaggtttcagccattcccacctttaattcttcctggaagagcagcagcccagaaaatcagctgcctggggaggaccagggtcaagacagaagccacaaggacagccaaggtgcctgccagtccctacctaacctggaaatgaaaaccaccaattccagaacagcccccagtgtggccctgtggcacccccatggcagcagcagcagtgcaggcaccgtaagaagccagtggctgccagggcgcatcctccaaggaaacatcctccctaggcagctccatcaggtgtgacactagcagaatttgcctgaaggtgtgacatcagccactcccccctacgaacacccatgcttcaggccagtctgaaagacccggcatgagctcaaaggagagtgggggtgaagaagcctcacagagtggacaggtgagggccaggaataaaatgaaggatgtatgtatgggtgtggggggtcaagtgcatcctggtgctttccatggagcatgcagaccccgagttccacagagcacgcacaccctgagtaccacagagcacaaggattctgagttccatgaatcacacagaccccaagttccatggagcacaaaggccctgagactccaagttccacagagcaagaagactttgagttccacggaaaatgaagaccctgagtttcatgcaaaatgaagaccctgagttccacagagcatgcagactgcggggttcaatgaagctcaacgagatgatgcaggagatcggccaggagtgggacacaaagagctgctgtgtgtgcacagcatgtttggtcttgggggcctttggctgtggaggttgaaggtgcataaaatgcggaggcatttgctcaacaggttttcaaagaagagggcatgcagcacttctgcacactcaaaagcatgctgggcggaaggttaaatgacagcctgcagccagctgggcaaccagaggagaggctggctggcctgtgcccacctgggcaaagcttcagagactggatgattttttctggggcacttctcccctcctcttctggggtgcttctcttgtcttttctttcatgtttgtggggcaggggagatgattctgtagaaataaacaaagataagaaaacttaatggccaggcatttaacatcttattttctgagcttctgctaatgatgggttgtgactactgacttgagtggttctcattaggttcatcttagagaacacagggtcgtcatttcctagagcaggttgcataacaatgatattaacaccaacaggcaccaccacacgtggttcatttttaaatttattttgtagagatgaggtctcattatattgcccaggctggtcatgatctcctgggctcaagcaatccttccacctcaacctcccaaagtgctgggattataggtgtgagtcactgtgtctggcctggcagttccttataaagctaagtatacacttatcatatgtaagctgacaacttatatccacacaaaaacttccatgtaaatgtttatgacagctttattcataactgctaaaacttggaggcaatcaagatgcctttcaataggtgaatggataaactgttgtggattcacacaatgaactattattccttgatttaaaactgagctaacaagccatgaaaagacacacaggaaacttaaatgcatattggtaagtgaaaggagcccacttgaatgctatgtaccatagaattccaaccacatgatattctgtaaaaggcaaaactatggaaacagtaaagacagcagaagttgccagggctgtgggatggggagggtgaaagaaaggaacaagtagctgaggcaccagggatattttaagacagtgaaactattctgtatgctgcattaatgatggatacatgtcatgtcattacacatttctcaaaattatagaaggtacaatacaaagagtgacctctgatgaattttagttaataataatgtttctacattgttcatcaactgtaacaaatgtaccacaaggcaagactgtaagggtaacaacagggcatgtgggcaggagactggatagatgagaactccctgtactttccactcatttttcatgtaaatctaaaactgctctaaaaaaaagtccaataatttaaaaaaatccaaaggaccatcaagggtagaatggataaataaattacggtatgtttgtacaattgaatagaatgaataaacttgcaagttaaatgtaatcccatggtggtacacacacacacacacacacacacacacacacacacacaatagaacatatacaaaaggaaatgaggaaattaaaacattaccaaaaatcaattaaatacaaaagaagacagtatgcaggaaatgaaggacaaaaaagctacaaggcatataaacaaccaacagtatatgacagaaataaatccctccttatcagtaaataaacaaaaccacaagttggtttttgaaaaggtgaacaaaactgacaaaactttagctagattgactaagaaaaagagactcaaagccaaaaataaaagtggggcattattacgaattctacagaaataaagaattataagaggtgtattataaacaactatttgccaacaaataggacagtctagataaaatagacaagttcttaggtatacaaaacctactaggactgaatcatgaaaaaacagaaaattagaatagaccccgtaaatactaagaagactgaatcagtcatcaaaaactttctgacaaagaaaggccctgaatcagatggcttcactggtgaatcttatcaaacatttaaataacactaatccaactcttctaaaaaattgaaaatcagagagcatttctaaactcattctatgaggtcagcattaccctgataccaaagtcagaaaaaaaagtagacaagaaaactagagacacatatcacttccctgatgcataccaatgcagaaatcctcaacaaaataccaacaaactacattcagcagcatattaaaataattatacactatgaccaagtagaatttattcttggaatgcaaggatggttgaacattcaaacgtcactgcatgaggagaatggagtggtaaatcacatgattatctcaactgatgtagaaaaagcatctgacaaaatttaaacacccttccatgaaaaaacactcagcaaatgcagaggggatggaagctacctcaatataataaagaccatatatgaaaaacgcacactaacatcatacttaatggtgaaagactgacaggttttctactaagataggaacagaggaaggagacctgctttcaccacttctattcaaaatggcttagaagttctggccagaacaattaggcaagaagaataaacaaatggcatccaaactgaaaagaaagaggtaaaattatatttgtttgcagatgatatgatcttagatgtagaaaaccctaaagattacacacacacacacacacacacacacacacctgttagaataaacaaattcagctgaatggtaggatacaaaatcagtgcacaaaaatcagctgtgtttctaaatactaataatgaataatctgaaaaggaaattaagaaaattctatttacaatagcatcaaaaagaataaaatacttaggaattaactaaaccaagaatgtaaaaatcccaatgatgtgctgggcaaaacagaaaaattcatcctaaaattcacataaaatttcaggatccagaatagcccaaacaatcctgaaaaagaacaatgttggaggacgcatacttcctgatttcaaaacttagtacaaagctacagaaatcaaaacaatgtggtgctggcataaagacagacatatagatgaacagaatagactagagagccccaaaataaactctcacatatattgccaagtgattcttgacaactcaacaacaacaaacaacccaattgattcatctgtgttgtatatgttctataatcctatttatatgatattttagaaaaggcagtattatagggatagaaaatgattagtggttgccaaagaatgcggttggggaagcggttgactacaaagaggcgtcaacaatagagaattttagagatgatgagacagttgtgttactgtgaacgtgaatgtataactctatacagttgtcaaaactcatgaaactgtatgttacaaagaatgaattttattctatgtaaatttaaaaatcaacaaagatggtgggcgggtcagatggaatgcagttggtgacaaatgaatcttactgagttaaaaattatgactaacccatattgaagagtgtgggggaaaaaagtcttcacctaagtaacctttgaaaatactgttttgactgcatactgtaagactcaagaactgcacacaaacatactgtattctggttggcaaatttgtttcagggtatgggtgagcaattctgaaatgattttccatgttagcaaatatattttagagaattagagcccagtttctctctgtaggtgaaagagttataaataaacaaagggagaatgctagaataaaccctaaggtgctggactggagttaggaatgtcagtatgaacccatgtctattttaatgtatctgtttagatggacagatgtagataggtagatgctgagtttgtattcatgcatacatgtttggaaacattcacatttttccaaactatgctgagagggcctcgaagcagtgatatcccagtattaatgagcacacccagtacccagatcctggtttctaaataccattctcctataaaagaaaccaaggcttcttggagaaatgactaattctaggcctgccacgaaaaacacaagatgagactagagcaacttgcagtgccagaaaataagaaagtgcttttaaaaaacataaaagggtggggacatgtcaaaagaagccaacctggaagagctctctatgactcaaggtggaacaatgtgagtggcaaacagttatgacagcactaaattgtaaccaagaacataaaataaatatccacaagtccatactgatatagaaaagattacataaatcaggaaggaaagacaaatcttccttgcagaagaattccaagtaataaatgttgaaggagcacaaatagaaaactaccactagaacaccacagtaatcattactgcaggaaagagtcatcaacgaatgcaaaaattgtggatgaagaaacagtatgtttctgtggcctcaaaacatctccctccaaatatttattatatatttttcttttttttcctcttaatttcacctaaagatctatgactaaagcaaatataacactgtgttgtggggtttatgacatgtgcagatgtaaaatttatggcaacgacagcacaaaggataggagataaatggtgctattctgtagcaagtttttctattttacactcactgtaacagtacaatattaactctaaactgtgagaatgttaatgatgcacactgtaatccttggaggaactgctaaaaaatgaaaaaatgtgtcacttcaatgctaataaaggaatacaacaatacaaaaaagtacttgtataagaatgttcatagatctttactattatgatagcccaaaacaggaaataacccaaatattcatcaacagagaaatgtatgaacaaaccatggtgcattcatacaacagaatactattcagcaatacaaagggacaaactactaaaacacacactatggaggtgtttcacaaatattatgctgagactgctggacataaaaatgtatattttatgatttcaagcaaaatgaacttacagttaaaaaacccccacaacagtactttcctctgggggagttaaaaattgcctaggaatgagcatgagggtgttttctggggatgatggaaatattccattctgaaaagaggtgaaggttatatgggtgtatttatttttcaaagctgtacaattaagatttgtgcctttcaatgcatgtgtatcttacctcaccaaaaaagaactaaaaaaaaaaataaagtgaggggtagtagggaaagggctgaggtacagaagaaacaaaaatggcacatgattattagctgttgaagctgggtcacggctctattatacaattttgttcattttttatatatttaaatttttctgtaacgaaaagacttgcacagaaagacaaaactgatctgtaatgtcagctgttaagacactggtacatttgaagaggagggaggcagaaagcgcttgtgggccacatgagtgaggctgcttctatttcttggttacccacgtgtatcaattttgtcataatatatattgagcttaagtaaatgctttatgcacgtatttctatatgcatgttatatatcaacaaaatagttaaataccacatatttgcacacataacttagtatctcagagtaacagcagtgttttttgtttcaaagtgggacacttccactcacagcatcatcagatgaactgtaatattctgatgtatctattagtgtcctaacccttgggtgagaccccctaggtcttcccatttctgcctcaatttggtaagtagtaagactcttatttctgacgatgtgattttatttcccagcaaagtcctccccaaaccaaggccacaataactagcacggtgctctgcacatcatatgcactcagcacttgtgaaattgagttgaatcagaaacaaaacgaggagcagaggtcaagtcctgcaaaagatagtaagtaagtaagtaatgtaaataacgcaattaagactgaaaggctacagctcggcagcaaagacttcacattcgtttaagaaaccatttgctactagttcatcaaaagacgttggtttcatgctgtggttctcaattctggccacacattgtaaccagttggagagctttaaacagcaaggatgtctggatcctaccccagggattctgatttcactggtctgttgcaacttgggttttgggaattttaaaagccccctgccacccaggtgattgtaaggtgcatcaggggtgagaaccttagctgtgcctgatttccttgtgtgctgcggggatttgcctcatcgcagcatctcagctttgcggggaggggtggtgggcagtcttagaaaacagctctgccctgttaaaatcaaaggacggctcaagacgtgctcagctgcttgactaaattgcagcaggaggaaatgtcttttcagcagatctatctttacatcacttgctttcagagtaagaggttgttttgggcacagcattttgatttagtctgtgttgaagaccagtaatagcctacaaataccaaaatgggatgaaaagaatttccaaacatgtgaagtgctttatacgtgtttcttcatccttccctgtgtctacaccctttgcaatgcgcttttacagctgctcccatccagagttagaatctgtttcccaagacttggatccagctggcagttttgggcccagtctcaaaaggtcttgaatgcttcttccttttctttcagaaccgtgctatctccgtgacaacaagcccaagttagcctgctagaggatgaaacactttgcggaagagaaccaaagttgcccagtccacaagccaactcactctcaacagcagagctgtctggtcaccagcagctgacccccttctcccatacacacacatgaagattgctataccttataaaggtacggcaggttttataggtatagcaattaatttatggcaggagcctgccataaattgctgacttgctcaatcatgagctaaataagttttgggatggctcattacacagtaacagctaactaacacacccagagctgacaggatgccaggattaacaacatgctgactacaagttagctggcacactatagggaccgtctaggtactgaattccttttccccttattagaagttgggtcccttgaattataaagaaatgcatgtagacatgtatgtgcttaaaactcacacagtatcacacaacacaggaggaaatagatgacagcctgaccactagggcaaaggccaaatagcaaggtaaggcatttgtctggaatctattccctccaaatctaaactctggaggtcaaggctgtggacaggacccacctcctgggaccccgctgtcctctgatctctggaggggagaatggccccaccaagcagcagatgggcagcagtggcctacctgtggccacctcctgctggcagcccctgctctctcagggcactctctcttcctttgggactgagaagagatgtgggtagggagggggagctccctccctcctggcagagaagtggggttcaggcccttcaccttcctgagttcagggagtcagagccctcagaacatctggaatctggctgctttgaactgagatatgctagaagtgtaaaatatggagtgagttttaaagatttaggacaaagaaatgtaaaacgtttcattagtatttttatactgatcacacattaaaatgatattttggatacatcgggtcaaataaattatattattacaaatcaattccatctgtttctctttagtttccttaacctggctagtagaaaatttaaaactacaggcaggcatagctcatattctgtttatattggacacggctgtcttaaaggactgcctcctttccgaagctcaggctgcctccagtcatggtggaaggggaagtggagcaaagaagaaaggaggtggggtgccacgcgctttcacaacaaccagctctcatgttccatagagcaagaactcactcactaccaccaggacagcaccaagccattcctgaaggatctgtccccaagacccaaacacctctcactaggcccccctttcaacattgggaatcaaatttctttctttctttcttttttttttttgctagaggacaggaaggttataaaatctgaaaattttaaataatttgtcattttgttgtttccatttgtgaacaaaggacttaataaaaaatttaagatttaacattaaaataaaatacattcatttcaatatcacgctggaattcaacattgttttgcacgggggctgcagaaacaatgtagagcttcttcctcctccagaccctcacagctcagcaagcctctcaagggctggttgctggccactgcgtttccagtttttgtaggttctcttcctcccaggtgattaaggaacaaggccaaaggtgtttgaagctttcagaaaacacaggatttttctttctgtggctcaccagcattttcatttctatatcagcaacaccatatgcaggccacagctgagccaaaacacataatgaattgagtctgaaatcaaattgtacctaatatttacagccatgtgcattactaaaaaggggcatatcttccaacaattccagtaagttcccaagacttagttcacactgggtactagcctgtgatggtgcccctgtgcttgttactgggggcaaaatgggacagtgtttgctgagttcatggctgaggggctgcggtgcgatgcagagagcaaaacttcccactgaataacactcctatgtgagagcggcatggcggccaaggtcagctggctcaaggcaactgcctccttttttcctaacaagcaacattttcagggaaaaaccccagcttcaatgtaggaaggttttgatggtggctcaggcctcggactgaattaaaaaggaataaggagataaaatccatattttaattataaacaaatgtctcactgaaaaaattccagacccataaatccatctatgtattagttattggagtaatttaaaatgtgaggaaattataaagtgtgtgtcccttattatatatttcttccccccaccactttttgaacatctaaagttcctaacacatagatactcttttatgaggaaaaaaaaacctgttgacattgatacagtttgaatatttgtcccctccagatctcatgttgaaatttgacctcctagtgagaccctgtctctacaaaaaattaaaaacttagttgggcatggtggattgagcctgttatcccagctactcaggaggccgaggtgggaggacctctggagctccaggagttggatgccacagtaagctacggctcagctcagccatggcttctatagtgagctataactgcgctacttcactccaccctgggtgacagagtcagattatctctttaacaaaacaaaacaaaacaaaacaaaacaaaacaaaacaaaacaaaacaaaacagaagaaagaaatttgattcccaatgttgaaaatggggcctaggatgggtgtggtggtgcaagcctgtaatcccagcactttgggaggccggggcaggcagatcacaaggtcaggagatcgagaccatcctggttaacacagtgaaaccccgtctctactaaaaatacaaaaaattagcccggcgtggtggtgggcacctgtagtcccagctactcgggaggctgaggcagaagaatggcatgaacctgggaggcagagcttgcagtgagctgagatcatgccactgcactccagcctgggtgacagagcgaaataccatctcaaaaaaaaaagaaagaaagaaagaagaaagaaatttgattcccaatgttgaaagcggggcctagtgagaggtgtttgggtctttgagggcagatccttcaggaatggcttggtgctgtcccagtggtagtgagttcctgctctatgaaacatgagagctggttgttggaaggcacgtggcaccccacctcctttcttccttgctccacttccccttccaccatgactggaggcttcctagggtcctcaccagaaacagatggtggtgccaggctggtacagcctgcagaatcataagccaaataaatctcttttcttcataaattacccagcctcgggtgttcttttatagcaacagaaaatagactaatacagacatcaatgtgaatatttaatattggaaaattttttttcattttctattttgtctgtatagctaacattaaagaagccaaagatatagaatgctacatctcagatattgcattttgtaaaaaacatgaaggtaaaatctttgtttcttcaattactaatcaatgatagttgtactttgcccattctatgcagaatacagttccatgaaccgtggggagatggaaaataaccatgtcccagccttccaggcaagtccctggaaggaatggcttggtgctctcccagtggtagtgagtgagttcttgctctatgaaacatgagagctggttgtttgaaagcgcgtggcacccctggtgcctggaaggctgggacaggtaagattgcatctctgtgctctgcagtgtctgtcacacagcaggcacttaatgagaaggctgctgaatgaaagaatacttccaaccagcttggagcccaaatgcaggttctccctgaagttctgacctcacgttgtgggcactgtgggcttccatgcacatgtccacaccacccgtgcacccacttccttcctggacctgagcagagccccactttccagctcctgcctgtgaggggataaccaggcccctgggacccacagctccagcagctggaattcagagtttatgacctgctgttttccacattccccctccctccccctcaggacctgcaccccactgcacggcaccttctattctgctgtcatggcccagagctctgttcatctgcttcaagcagctctccaccccgcttcctccctcccctcctgctggatctctttctttcattggttcttgtcccgttccctcagtaaaagaactctccttccaatctgcctcattcacattcacttgggaaccaaaaattcaccccacagcttagtattcccagttgtggaaaaattcaggcaccttctggatgagacaaatgtgaagaagccagacatgaaaaaacacttatatggattgatttatatgaaatgcccagggaagaaaaatctattgagatggaaactagatttgtgattgcttacagctggggtaggggtgggggaacagggtgatagctaaaaggtacaggactaataaaaatgttgtaaacttaaccatggttttggttgcacatatctgtgattatactaaaccctagcagatcataaggtatgtgaatttttcctcaataaagctgtttaaaaataaaaaaaaaattaggctgggcacagcaacttaccctgtaataccagcacttggggaggctgaggcaggaggattgtttgaggctaggagttcaagaccagcctggacaatagagtgagaccccatctctacaaaagatttaaaaaatttagccaagcatggtggtgcgcacttgtagtcctaggtacttaggaggctgatgtgggaggatcacttgagcctgagaggtgaaggctgcagtgagccgtgatcatgctactgcaatccagcctgggagacagagaaacatcccaactcaaaaaaaaaattattacgaactattttatacatacaaaattacacagacacacacacatacacagactcacataaaagtaaaataaatacattgtacccatcacctgcaccactacatttgaagccatctgcatggttggcccttctgaaatgtaaccccatctgggacaatcattcatctgaagctttacaaaaagtatttccctgactttcattatacttttattacataataatatctctaaataatatattgtttctctaaataatatactgtttaactttgtaagtttttacactttctataaatgtgctgtgtatctctgtaacttgcattactcattccacattgtattttcgagagccttctatgttttaagtagtttctcattcaattctatatattgcttactaattagcctttaaattgaatatactaagacctgctggagagagaattcttgtgggataatgagtataaagtgcttaaagcagtgccccattcattataggtattcaatatatgtaatactatacacaatattttaatactgagtaattatatacatattatgattgcttgtttctttgtggatgtacattatttcatcaactgcactatgaactaatagttttctttcttctaggggagggggcggggtctggcactgttgcccaggctgaagtacactggtgcgatcacggctcactgcagcctagacctcccgggctcaaggatcctcccacctcagcctcctgagtagctgtgtctatcagcagtgccaccactcccagctaatttttaaattttttgtagagatggggtttcaccatgttgcccaggctggtctctaactcctagctcaagtgatctgcccaccttaacctcccaaagtgctgggattaccgctgtaagccattatgctgggcaagagttttcaaactacggtaaaattcaagttacagatacctttgggaaatgcctcattctaagtatttgaagcttccagatagctaagattaaaaatttttacatactaacttgtttctaagtgtatgcttttacatttaaacaaactaaaaacataagctttataaaaaaatttcagccatttccaaattctcttccaaacttgtttagaaacatacatgacagagctttggtcggattgtgcaaactgttgtgtgttctgtttttaaaatattacttaacttgtacacttccacacattggcatggcacatcattgccatttccaatacgttcctgtgcttcaccaatttccatagctgtcagagggagagcagcccaggtgacaggaaatgaagttgtctggctccgagtccttactaggaggacttctgggatccagaatctttgcatggggcagatgacatattcttagaggccattcattttttccactgtagctgctagtgccagtttccactccactgcctgagggcaggttgatcttgtaagccatcaccgatggatttgtggtcactgcctggaaccctgtgccaaagaggactgggaggtcccattcaggagggaatcctctgacttattactggcatctgagcatctcccagcatggctgttcctacttgtaataaggtgatgtcaaatgactccagggcagtgctccggttcccatgaacacatctggtcactctgggagcttttgagtcagtgagctctctcctcacatcccgatacactgttgtttgcaaaaatatatttttataggcaaggtatttgtgttttggatttgcaccctgatgcaggcattaatttgtttaaaaggataatttaacattttcaggaagctgaacatctttaaattctcttttgattatttctagttttattgcattatgacccagaaatgtgtacaatttttgttcttgtatactcactaaggattcttcttgttttcagagtaggaccaaaggtatttctatttgtttgcaagtctgttggctcagtttctaaagagttcattttgttaccatgttcttttaagtatatacatacaggttagttacgtttccagtttcctgtgctttttattttttttttaaacaagcttttctggcccttcattctctcagacttttccttccatgccttatgctgtagataaagtctatgatctaacgtctgtcagttaagattgttttcagctctggagaccagaaaatctgacccacatagcaagaacaagcaagggcaggagatgaggctgaagaggcaggcaccaggttgtctgagcttttattctactgcaatgagtagatagtggcagggtttacacaggggtgggggtatgcctatatcatgttttaacattttcaagagatcactctggatgcttgagtggaggctggactgtagcagggcaagacaagatgcagggaggttggaggattcttggcagtagcccagtaggagaggaaggtgactgaaactggttgtggaaatggagatggtgaatcaggatgctggttgcactcaagagccacaggacttgctgtgtggttgcatgggggttgggggagaagggaaaagagtcagggatgactcttggtgctcccctcagggaagaggccccaagcctagtggttatcaacagatggatggtatttaaagctatgagactgtgtgggatcattctgagaggatcactagagatctggtggaggaggagcaggaggatgaggataaaggtgagagggaatccaggagggaaggtccctaaaatccagaagaaagggtggaactcctcaattgtatcgtctgtgtcaaatgcagctaaatgactgagataaaagtcgtttcagcaaagtaccttggaggaaagctggaaaggagtgggtgcaagagaggacatgaggtgaggaagttgcatggagcagagaaacagaatggtaaatggagagaaacctggggttaaaaaaggtctatttgtttaatgcacagcattaaggaatgcttgtgtgtggacactagcaaaaaatcagtacagagaaccccagaattctggggtcatagcccgaaaggactcctcagctccaaatttacttgaagttacagcttccatctttaaattaaatgggattttttttttttttgccatctatttcatcatacaggatgtgacacagaatatatctgaaagtataactttcctggaagaacacatcttagtttttaatatctaaactgtatagcagctatttatctcacaaaacatttttcaggctgagtgcggttggtgactcacgcctgtgattccagcactttgggaggccaaggcaggaaaattgcttgagtctagaagttcgaggccagcctgggcaatgtggggagatgtagtttctacaaaaaatttagaaattaacaggcatggtggcacaaacctgtggtctcagctactggggaggctgaagcaggtggatcgctggaacccctttcgtggtgcagtttgggcaaaagagcaagaacctgtctcaaattttttggctgatggttgtagacataatgtttgagctttcaaaaattacaacattttaaactaaatagtttgctggaaaaaaccacatgttccttccagaaacaactggtagaccatcaggatcatgacagtcacttcaaaaagctttggtgtgttgacaaaggggaggttcacgtgtgatgttgctggtcgcacagctactgcatccaaggcaaatgcatgttaacaaccatatcaaatgtgggtgaccaagtggcaacatttaagcattttacatcctaacttatgtgcaacttaaacctactgccacactgtgagttaggaaattggtaggtttttttctattgacttgttgtgccctataatttttcctatttaaaataatgggaaacaagttttcagtttttttctcagaaaaagtctgacatttcaggcacagatatgtctgacagttattaccagcagaagagtttctagccttttcatcgtaaaattttaattacttaccttggaaattacttaacttcgttccttccaaatctggtagtaaaatgggtgctccagaaagctgtggcacggatattctgctgctttgctcgtctctgcacagacctggggcttgaggagcctgcagccacgaagtacaggacgtcatcagaatggaaaagcgatccagatggtcccgcaggcgcagtgctggggcgtaaagtgcagcctgtgcacggcgggtgggaggcgcgcgggctcgccggggctcgggactgtgttcttgcagccgagaggcccacacaggacaaggaggcctgacccaggctgttggagcccgcgaagagggggtgaaactccaaggggcgtaagggtgatcacacgtgcggccaagcttcccgtctgcatggcgaggggctgggcctttccgtcgtgatttttctcccattatgccgggcgcgtagcgggccctggggcggcgggaccggtgcgggcgttcagtcagcccggggtcctggaggccggcggggggattcgcagcagcccgagggacggatggatggcagaaaggagtctctacttccaggttcccagtgatcgctatgttccttacaagcagtaaactcacgacttcagacacccgccacggagctccgcgcgcagtcctcaaacagccagccacgccggccgggcgcacagcgcatgccccggggtcggggcggggcggaggagacggggcggggcggaggggacggggcggggcggaggggacgaggcggagccgggcggggttgaggggacggggcggggcttggcgggggcggagccgcccagcgctgaatccaaatcgtatctaagctattttctagctctgacatcgtatacatcactgcatacgtgaatagcatgccaaatactgtataaaccaatactggtttttttcttctcgggaggtactatataaataaagcacgtacacggtatctaatatcagaacattcaaatcccatattgaaaagattataaattgaccataatcctataattctgtttagcaacagtgcgttccttctcagtcttcacttttaaaatatctaagaggctcgatgtcttgaggctttttctttttaaacccaacatcctttttcacatttattagtttagtactttggttttactcaataaaaaggtggggttaaaaaaatctgaattattctgcaatgtttcaggcaacagaggctgaaaacaacactgttaaggcggggggacaattcttatactctgtgagtcttcttgtttaattttcattaaatttccagaataataagcgtaggatagctaacgtttgtctttgcgtcgtagattagttaacctttactgaattcacaatatggcatcagagatttaatctgcatttcctaattcttataaattaaagctgaagtttaagcttcattcgcacgtcacaaataccacttgccctgaataaataatgtttttagaagtgagcattcctgatctccctgtttgttaagaattgtcttcttttttcagctgctactctgctaagacaagagttagcccctgagctatgttatcagttcaaggctttgcagatagcgctgtatcgtgggggaaaaatgaacatggttttcaaaaaggaggagaacatttctataacgttgagacttttagtaatcagggctattgatgtcagatggctgttgggacaaatgacatcataaaaaatacaaaatttaaaattatgtttgtttatgtttgtttgttttcagatttcttagtagtaaaggggctgtgttttcactcaggcttatatgatgatgacatttctcagaccagcagctatctgctagcattctgtcctggacttggggtgcacctgtgacagtagctgggcttgtcatccagtgaatagctcatagttgactcctctccatcagtataagcatgggtgtgggtgactgcatggtagagggggccggggtagccagggaccagaggttagtgaaccattgggtaagatgtataactgttactcaggctcataatttttcaactttttcagatagtaataacaagaaagtccatccttaccagtgtcagtctctgttttaagtgttgttcatatattacctcatttaattatcacaccaaccctatgagactcagaatgtaaataggctactgaggtcacattgctggtggatcttaatctcaggccagcttggctcctaagtgtgtgttctcactctattgcctctagaacaggaaggaatatatggatactgtaaattgttaaagaacaagttgaaagaattttatttccggcaacatgggctgacaagaaccagaaaacaacaaaaacttctggaatacatatcaagaaccattttaaaaaatgtatcaatgagctgcaaaataattaagagttcgcaaaggcaaaaaaattaaaattaaaaagtgaaagtagaaacccaaagaagtaattagatgccatttttcacccttaagatagttgccaagtgtcatactgaaactctcttttcatagtctgggaagaggatggggcagcagaatagcagacaaagtttagatcctgtccaaggtaggacggttagcagaagacatcaaaagtaggacaccagccgggcgcggtggctcaagcctgtaatcgcagcactttgggaggctgaggcgggcggatcacgaattcaggagatcgagactaccctggctaacacggtgaaaccccatctctactaaaaatacaacaattagccgggcgtagtggcgggcgcctgtagtcccagctactcgggaggctgaggcaggagaatggcgtgaacccgggaggtggaggttgcagtgagccgagattgcgccactgcactccagcctgggcgacagagccagactctgtctcaaaaaaaaaaaaaaaaaaaaaaaaaaaaaaagtaggacaccaaaaagataggtttagtgtaggagggaactatgaatcaacctgtctgcctcccctgtctcctgccccctcaatccctgcagcccctggagcagcagacaagattatccatcctgagggaaaacatccctcctgagagtgaggatacattaatatataaccatgggcagcccttccactggtggcttcacacacaaactgtataatctaaaaagtctcaagctgcaaatttaaagtgacatcaggtttttaatgccttccaggtgcctggcaaaagcaaaatggaagacagcttcatggaatgtaagtttttaatcaaaaatcacaaacatttataatgggcaagagccagcagaaacaatgtacagaggagaaaacctacagagacttaagatattagagtcaccaaacatcacataaagtgtgtcttacatgtaaagaaacaaggggattaaagagcatgagtatgaaaataaccaagtagattgggaaaaattaccaaatagaaatctagatttgaaaaataccataattgaaatggaaagtttaatggattagtgtcacagccaactagatactaccaaaaagagaataatggatatgaagaaataaagacatttttagacttgtaaagacttaagactttcttacctggagacctgcaccacaagaaaaattaaaggatgtcttttaggccttaagaaggataccatattgaaatctagatctgcacaaaggaatgaagaacactggaaatagtaacaacatggacaaatatatgatttgttattattacttaagcctctttaaaatataattgtttaaacaaaaataataaagtactatggaatttacaacatgtaaaataaaatggatgacagtcatagcttaaagactaggagggaagaagtatactgatgtaagtttcttatactaaaatgatatattatcacttgaaggtagactgtgatcagttgaagacatgcactataaacactaaagcaaccactaaaataacaagccaaagaattgtagctgttcaggataacacaaacaatctcatcaaaaagtggactaaggacatgaatagacaattctcaaaagaagatatactaatggccaacaaacatatgaaaaaaatgctcaacttcactaattatcagagaaatgcaaatcaaaaccacaacacgataccaccttaatcctgcaagaatgaccataataaaagaatcaaaaaattaaaatagatgttggtgtggatgtggtgagaagggaacacttttacactgttggtgggaatgtaaactaatacaaccactatggaaaacagtgtggcgattccttaaagaactaaaagtagatctaccacttgatccagcaatcccacttctggttatctacccagaggaaaataaatcattacatgaaaaagatacttgcacatgcatgtttatagcagcatcattcacaattgcaaaaataaggaaccagcccaaatgctcatcgatcaacgagtgaataaagaaaatgtggcatatatgtgtatatgtatgtatgtgtgtatatgtatgtatgtgtgtatatatatgtgtgtgtgtgtgtgtatatatatatacacacacacacgcatacataccatggaatactacttagccataaaaaggaacgaaataatggcatttgcaacaacctggatggaattggagaccattatcccaagtgaagtagctcggaaatggaaaaccaaacattgtatattgttactcgtaagtgggagctaagctatgaggatgcaaaggcataagaatgatacaatggactttggggacttgggggaaagggtgggagggggtcgagggataaaagactacacattaggtacagtgtacactgctctggtgatggatgcacaaaaatctcagacattgccactaaaaaacttattcatgtacaaaacactgcctgttccccgcaaaaacctattgaaataaaaataaagaagggtaaagaggaagcagaaaaaaaaaaaaaaactgaaaagcaaccagtaaaggagagtatgatgttcacaaagccaaaggaaaacattatttcaagaaaatggtggccaactttatcaaatgctgctgaaagttgacataaaatgagacttgataatcagccattggatttagtaaagtggctagccctcatgacctcacaagagtcctttgggtgaagtgataaggagaaagcttgactgaaagggatttctgagagaacaaagtagaggggttgaatgcagtaagcacaggcaacaatttcaaaaagcttcactcaaaaaaggaatggagaaaaggcaagtaattatagaggaagtagagtcaagatcactgtgtttaatgttctataagatgagaaaaaataatagcatgtttgcatgccaatggaaatcatccacagagagggcaaaattgataatgtaggaaatacaaggaagtatttctggaataatgtccttggattggaagttaggaaaaagaaatattgactttagatgatagatcattccattcatccatagtaagtggcatatgagtatatgagcacaaatacaagtggatggatagatgcgttcatgccaactcttaaggttgctttcatgaaataaaggcaacatagtactttttctccacttaaaaatttacaatagttaataatgtcatatagaattatgtggaattcttgaaatattcagtgattaaaagattatttactgaagcatgcgttctgccacatagttttctaggcattggaggtaaaacagagacaaggttcatacttttgtgaagtggggacaaacagatatatatcacagggcacagagcaaagccagctttcatagggaagtgaggagtcaagttcagagagagtgggccccgggtccaccattctttcaatatctacagaactggggttgtagaggggatggtttgaggtcttctagtgactaatttgaacttgccattccagattcatctctcattcagtctttgcctacatacttagcttcagcgactgccaaatctaaccaccccagtacaaaactacaccaacatttccatgtgtactggtctgtttttttttttttcatactaactccttagcctcaaatgcccttttccccttctcatagcttaccattattttaacaccctacacaaataacacctcttcagcacctttcttcaaataaaatgtattatcttaaggtttacaatttaaaaaaaaagaattgtaggccaggcacagtggctcacgcctgttatcccagcactttgggaggctgaggagggtggatcatgaggtcaggagattgagaccatcctggctaatacggtgaaaccctgtctctactaaaaatacaaaaaattagctgggtgtggtggtgggtgcctgtagtctcagctactcaggaggctgaggcaggagagtggcgtgaacccaggaagtggagcttgcagtgagcagagatcgcaccactgcactctggcctgggtgacagagtgagactccatctcaaaaaaaaaaaaaaaaaaaagaattgtggccgtttaacaagagagataaaatgagataaaatggtacgataaaaatacttgattaattcaaaggaaaatggaaaaaggaaataaaaaacagatgacatgaatagagaacatgtgcaaggtgagtggctcaacctaatcatatcagtaatcatattaaatgtaaatagtctaaataccccaactaaaaggcagagaatgtcaaattacattgaaaaactaagacccaactatattctgcctataagaaaggcactataaatataaagacacaaataggttcaaagtataaagatggaaaaagacataccatgctaaaactagtcaaaagaaatttagagtggctatattaatatcaaaatagatttcagagcaaagaattatttctaggaattaaaggttatttcatactgacaatgtggtcagtgaagaagatataacaatcctaaatgtttttgtacctaataaggcttcaaaatgaataaaagaaaaactaataaaacatcaaagagaaataggaaaatgcataactatcagatattttaatagccctctctcaatatactaggaatacttttatgccaattaaattcaacaccacggataaaattgacaaatttcttcaaagacaaattaccaaaggtcacccaagaagaaacagataacctgaatagccctgtatctattaaagaaactcaaaatcgttttttacacttgatcttaggtaaaaggcctagaaatgatgaaaagtgttgttttaaaacctccctataggctaggcacagtggcttatgcctttaatcccagcaccagcaccttgggaggttgatgcaggcagatcacctgaggtcaggagttcaagaccagcttggccaacatgatgaaacctcatctctactaaaaatacaaaaattagctgggtatggtggcaggcacctgtaacctcagatacctgggaggctgaggcaggaaaattgcttgaacctgggatggggggtgttgtgggaagtcagggaccccgaatggagggactggctgaagccatggcagaagaacataaattgtgaagatttcatggacatttattagttccccaaattaatacttttataatttcttacatctgtctttactgcaatctctgaacataaattgtgatttcatggacatttatcacttccccagtcaatactcttgtgatttcctatgcctgtctttactttaatctcttaatcctgtcatcttcataagctgaggatgtatgtcgcctcaggaccctgtgatgattgcgttaactgcacaaattgtttaaacaatatgaaatccgggcaccttgaaaaaagaacaggataacagcgatgttcagggaacaagggagatatccattaggtctggctgcctgagagccgggcggaacagagccatgtttctcttctttcaaaagcaaataggagaaatatcactgaattctttttctcagcaaggaacagccctgagaaagagaatgcgttcttaaggggaggtctctgaaatggccgctctgtgaacgtctgccttttatggtcacagataagggatgaaataagccccagtctcccgtggcactcccaggcttattaggatgaggcaattcccacctaataaattttggttagacccagttatctgctctcaaacactgtctcctgataagatgttatcaatgacaatgcatgcccaaaacttcaacaattttaatttcgccccagtcctgtgatctcaccctgcctccatttgccttgtgatattttattaccttgtgaagcatgtgatctctgtgacccacaccctgttcgtacactccctccccttttgaaaatcactaataaaaacttgctgcttttgtggcttggggggcatcatggaacctgccgacatatgatgtctcccctggaaacccagctttgaaatttctctcttttgtactctttccctttatttctcagactggccgacacttagggaaaatagaaaaggacccacattgaattatcaggggttgcttcccccaaggttgcagtgagctgaggtcacacctctgcactccagcctgggcgacagagcgagactctccctcaaaaaaaaaaaaaaaaaaaaaaaaaaaaaagacctggctctgtggctcatccctgtaatcccagcagtttgggaggctgaggtgggtggatcatgaggtcaggatgaggtcaggagatggagaccatcctggctaacacagtgaaaccccttgtctaacaaaaatacaaaaaattagccaggcatggtggcatgagcctgtaataccagctacttgggaggccaaggcaagagaatcacttgaacccaggaggtggaggctgcagtgagccaagattgcaccactacactccagcctgggtgacagagggagactctgtctcaaaaaaaaaaaaaaaaaaaaaaagaataacataaaacctccctataaagaaattccagcccagatggtgatagtagtgaattttaccaaacatttaagggagaagtaataacaatacttcacaaactcttccgaaaactgaagaggaggaaatacttcccaactcaatctatgaagtcagcattaccctgataccaaaattatccttgtaccctggccagacaaggatattagaagaaaacaaaactacagaccaatattcctcatgaacatagggcaagaattctatgcaaaagtttagcaaatggaatcctaaatataatagaaaggtaatacatcataattaagtggtatttatcctagaaatgcaaggttgatttaagaataaaaaaaaaatcaatgtaatttaccacataaacaaactaaaaaattatatgatcaccgtaatcaatacagaaaaaacatttggcaaaatccaacatccattattgataaaaactgaggctaaataggaacagagggaacttcctcacgctgataaagggcaattccaaaagtccttcagctagcatcacacttgattgtggaagactgaatactttccccttcacatcaggaacacactagggatgcctgccctcaccacctctatccagcactgtattggaggctgtagactgtgcaatcagccaagaaacagaaataaaggacattcagtttggaaagaaagacataaatggtcgttattcacagatgacatgattgtctgtgtagaaaattcagtggaatgtacaagaagttaataagtgtgtttatcaaggttttaggacaaattagtgtacaaaaattgtttaatgagagctttgtaacttaattcaaaattaaaatgtaaagcatgtattattggttggattaaccatcccaaaatgtatacatattgcaaaatatcatattgtacactatgaatagataaaatttgtatttgtcaagtaaaaaagaaagaaattaaaataaaaaaattaacaacatttacaatagcatgaaaaatgtaaagtacttaggaacaaatctgacaaaaaatgtaaaaggcctgtacacagaaaactgtaaaacattgctatgataaattaaagaagccataaataaatggggagatatatgttgttcatgagtgagaagactcaatattgttaagaggttatactcttaaaacacagattcaatatagattgactacaatcccaatcaaaatccagcaggctatttattcgtgtctagatccattccatcagagacctggcacccacaacaatctgccaacccatttgggaaataagagtcacccctggtgtgcctgaaaagcaccgtcagctccccaggtcaccagaaacaaaagtcttaactggctctgagtgttggacatcagattaccctggtttcagcataacgtacagtcaagttcagctgaaactgaagctgtccataaccgctgctttatgttggctttgggacctggcaaccaccattctactttgtctgtatgaacttgactgttctaggtatccatgtaattgcaatcttgtagcatttgtctttttgtgactggtttatttcactgaaagcaatgtcctgaagattcattcatgttgttgcatgtatcaaatttccttccttttaaaagctgaataatatttcattgtatggatataccacattctgcttatccattcatctgtcaatgaacacttaacatggcttccaccttttagttattctgaataatactgctatgaacatgtctctttatgtgtttcatgctattgttttgggtatatacctgaaagtggcaatgctggatcatatgttaattctgtgtatggttttctgaggagccatcaaactgttttccacagcggctgcaccattttatattcccaccaacaatgcatgggggtttcaatttctccacatccttgccaatgcttgttattttctgtttgttttatttttggataatagtcattctaacatgtgtgaagtagtatcccaccttggtttacatttgcattccctgatgactaatgatgtcaagggtctttccatgtgctttttgtatatcttctttggagaaatgtcttctcaagtcctttgcccatatttaaatcaagttgtttaagttattttaaggatcaaataaaatagtgtatttagtacgctgactggatcataataaacactccacaaaatgttaaaaaatcgaggttttttttgttgttgtcaagttgaatgatttttttaattgaagtatatctgtacagataagccacaaatcccaagaaaacagattgatgaattatcacaaagtgaacacatctgggacaccagcccttagatcaagaaataaaacattaccagagctcccatgcaaacactaagataatcactatgctgacttataacgctataggttcgttttgattgttttggagcttcacggaaatgaaatagtgtagcacacattcatttgtatcaggtttctttcactcaatattatgttggtgagattcaccaactgtgcatggcagttattaatctattttcattaccataaaaattccatgatataatatatatttgtccattcttccgtgattaacattggctactatgaagagtgcctctatcaggatgcatttcttttgggttttcacatcggagtgggatttcaggattgtaggggtgctcacctttagcagtattcccaaataattttccaaagtagttgtgctatttcacatttccaccagcagtgtataaatgtttcagttacttcacattctcaccaacacttggtattaacagtcttcttaattttagccatgctggtcggtgtgtattggcttctcattgtggatcacatttgtctgacgttttatgaggttggacatttttatatgctttctggccatttggatgttcatttgtctttccttacttcctttttctttttttaaaaaatgaagttcctattcctttctcttgttcatttttctgttggattctttattttatttgtagaaattcttcatgcactctggacatgagtcctttgcctgttatattgtgacaaatatatttcccattggtgactaatcttttccctctcttattgaatttcttgagggattcttaattttactatcatccaatgtattgatcttctccttttggggtagtttttttttttctattgaagaaatcattccctgccttctgaggagcttttaaatctacatatgcctactaaaccgcactgctttgatatatattttatgctagaaaatgaactaggcactttcatgatgttattgtctattttgtgggaaaatatcatcatcatcactttcccaggccaggacatgatatgtgtgcaggataaggccatagctccctgacatctggaactcttcctgcattggggagggtgggcctgatgccacaatggggtcaggtgggtgctaattcccaactccacaggtgcagggcttggaaaacagaggacagccaggtcagagctgtggtcctgcaatggactgaggatatagaagagtctgtattgccatgggggtccagggactgcaggaggtgggagaggagcaatcagaagatatatcctgtgtgaggaagagcagagcacaagggatgaggccccaagaaaagggcaagaagggagggacctcttgcttaacagctcagtattacaggcatctagaggtgagggcacagccactggctccaaatgtactatctctgacatttgttattttggtgcaaggactgggagaaagttctgcactgtacagagcctgcccaggaatggtagaggataccacaaagcttgtggatgagcagtcaaggctgtcctgtgggcaggggctccagggcatgtgagccaccctggagctgtggatagggccaggcctcccaggaggggcccacaccagcctttctctctcactctttctgaatcaagaatgttgaacacacaatgaaaagtccaacttacaaaaagaaagtatttgcctgatgaggttagaactggtattataattagtttgccgatctatatattgtgacagaaagcagatcagttgttgcttggggtggagcatggcaggagaggcaggaggaagagatcacaaaggagcacaagaaaacctatgggggatggacatgctcgctgtcttgataacagtgatggtttcacgggtgcacaagtcctcctattatatgtcagtcacccctcagtgaggctgttatgcatcctcccgacacacagacacacagacacacacacacacgtagttgcaatgaaatggtttaagatacacttgagttccaaaagtacacgctctccaagcctgccaatttggctcttccaagtgtcccagtcactagggagcaagaccaacatttggcctgactccagctgcaacatggctgttgacactacttcaggttcaaagttctgggactccatgaagccccaacagagaaggaaagactaccaaccacacatctgacttgcccctgactactacacacaggaaatcactggagcttctgacttgaactttaaaatctgtgggcccaagacaggagatgtccctcccaacccctctccccccattcatgggaaaagtggcaattgagagtggaggagaggattaaaatactaagggaatgaaacacatctgagggtcctcagttcattgctgagaatggctgttggaatgataaccacgcaccttagagaacaagaattgtgggtaattttccttcctgcaaacagtatgtttctttactagtttcttactgcaggaggctttaaagctccatagaatatcttcagtaataaggaacaaaacgaaaaataaaaaataacggtaattgtcacagctaacagattgctattagcaaagattttcagaaaggtgtaaaaatcagcaggctatatttttacctaaatgatccctgcagtctatgaagaggtgcctccaaggtagctaagacactggcctgccatcacgggacattcccgccctggtccaggaggcctgagctgaccctgtccacttcagctcctctgtgaagtgatcgactctggtgctgatcacttgttccctctggtaattgacagctgttgccaggaagctgaccaaggacattgctgaggaccagacaggggcaaacaggctcccaccctgggaccattagcacagggctctcaccatctgagcaccagctccagagaaaaaggagaaagagttggaaatgttaccgggaggtgtggggtcttcagttcttgtcttcttggaggaaagaattcagccaagaagtaagcagtgacagtgaagcagctgcagagtttatttaaagagagagtaccctctaaaagccaagtcagagcgggctgcttggaaaaagagacagcgttgatctgcactgggaaagttcccttatgagggtcttatatgattattcataaaagtggttgtgaaggggtgttactagcaaacatgttttgggtggtctcctgggtgcacatgctgtatggtcatacacgctagtacatatatcacacgtcttagtaatgtctgaaatctccacccaggggcgtgttttttttttaccattataatgagtaaatgttaccttcagggcaagccaagtcgaagtgtgcatgcttgctattagggaaagcccctactgaagttatctcctgtcagggtcagataagtcccagttaggaccagagaagccaaacctcaagtccagatgtggacttgggtgactgagggtctgaggagtgaattgtttgcttcacagtaaaatctaaaacatttatgcagtacgtgagtcgatgcatcttcaacacaggagtgtccagcctggaaaaccaggggccaccctagggaaagacccaatgacatcacaatctttaaataggaatgagaggaacaaggctggtggacatctccctgagggcattagtttccaaatatttgagcaaggcctcctttgcaaatctgggtgatggttatcaagatagggacaagaggtatccagcaacaggtgtattttataaaaattagttatgtaaacgttaaacatttagcttgtaaaaattaaaacaccacagcagtgtatttgaaaagtaaacatttctcattattacacctactagagataactagcaatggctaaacaaaaagttcggtgcatgttctgtgtacactgactgcctgaacctttcaagtctatttggcttctgatttggatagggagagtcaagcaccaagcttgactcaggagggagagcactatccaaatgaatgtagctccagtatgaatagcaagagtttatatagaaagggactcacctaaaaagttatctgattttattcaattattgagcttgacagtaaaaggttggataacaagggatagctgtaatcacacacacgatgagaacacaaactgcttctaatattcataaacgagtaagtatctgagacaggtctcaatcaatttagaagtttattttgccaagattaaggacaagttggaaggaaaaaacacagaatcatataaacaatctgtggtctgtgcctttctccaaagacgatgctgaggcttcaatatttaaaggggaagagtatgctggaggggaaagaggaagggtatggccacattactgaatccacacattgcaaaagaaaaggataaggcaggggaatagtcaattttgtattcatcttatgctcagtaaatcagcacttcacataaggtaagatgaggacagagcacctacctgtggggatatttaaccttctatctggagctgtgtgcttaggagcaaaaagaaagtcagcttcttgcatgactcagctttcagcttaactttctccttttggcagagtgaattggggtcccaagtttctattttcctttcacacatttgaaactagacttgattttgcttagaaatgtgacatttatttatacttctaaacaaaatcaaggctagttatcaattgcccattttcagagaatgagaaagcccaagagctcatgactccttcccatttccttgggttatggataccaggaccctgggttctgcagagcctggggacagtggatgagagaatgctgtttctgagcatgatatggttgctgtcagatccctgctcctaaacttactagggagtgactggtcaacaaaaagagtcaaactctaaaatatttgaagagatttattctgagccaaatgtaagtgaccaatgggccatgacacagccctcaggagaccctgagaacatgtgcacaagatggtcagggcacagcctagttttacacattttagggagacatgagacatcagtcaatacatgtaaggtatatattgtttcattctggaagggcaggacaactcaaagtggggacttccaggttataggtagattttaaaattttctgattggcaattggttgaaagagttattatcagtagaaaggaatgtctgggttaagataaggtgttggagaaacctagatattatcaggaagataaagcctccaggtagcaggcttcagagaaaatagatgttaaatatttctgatcagaatcttaggtttgatgttgatgtcttaaggtctgcgttgatgttaatgctggagaaatataatgaggcatgtccaatgctctcttccatcatggcctgaacaagattttcagtttcactctggaatccctatggctgagaggaggggtacattcagatggttgaagggcttagaattttatttttggtttccattcttccctttatggccaatatttgccagcatcagcatcaatggctattaattttttttccccctagcactgcttgggtggcatatctgcctgccctgtgtccatcctgtccttcagtgagactccctgtggtggagggacttgaagtcaaaatacttacagacaagtaagtgttctaggaaagataggaatggactcggacaggcattcattaccccttaaaagatttatttaaagtaaagagccaaaaacaaaaagccaatggcgagtttacaaaaattgagttttctttcatttctatgcgttgagctactataatcttggttttaattataggcttacagtgattaactatacaaaacatatacatttttctaaaaaataattttatatatctaaatatatatatctgcaaaacttataactgggagtattatgcccaggaggcttggccatgaggtatctttatcctcttattttcttttaattccaggaagcaggacatttttcatggttggggtggataaaaaggtgccacgtaatagctgagaaagcaaagttctttgttttacaagctgtttaggcacttgtgtaccctcgttgatttgcagtgtctcagctaactgtatccctcaaaaccagcccttacaatctcatgcacccatctcttctgaaacagtctctgggcctagagggagggtgcttgcatcgtcttagcagtaggacatttgcaatgaaaaacagatcgggtccagggggatgccaaataatggagatttgcatctctaatcttcagaatgccatgattctggtttcctttgaagtgaaacaaggagagataaataagattaatattttgaccatcagaagagtacttgtgtgtcaaaagagaaaaaataccctatttcattaggtcaccaactgaaaatatgaagaaaaatgataatcttgtactcattagaagattattataactatgaaaactttcaggattctcaggatcatcttggctatacggggtcttctttggttctgtatgaaatttaaagtagatttttctaattctgtgaataatgtcagtggtagtttgatgggaatagcattgaatctataaattactttgggcaatatggccatttttatagtattgatttttcctatccatggggatggaatgtttttccatttgtttatgtcctcttatttccttgagcagtggtttgtagttctccttgaagaggtctttcacatcccttgttagctgtatttctaggtattttattcatttttttagcaattgtgaatgggagttcattcattatttgtctctctgcttgtctattgttggtgtaaaggaatgcttgtgatttttggacattgattttatatcatgagactttgctgaagttgcttatcagtttaaggggttttggggctgagattatggagttttctaaatataacagcatatcatctgcaatcagaggcaacttgacttcctctcttcctatatgaataccctttatttcttcctcttgcctgattgcccttgccagaacttccaatactatgttgaatagaagtggtgagagagggcttccttgtcttgtaccacttttcaaaggcaatgcttccagcttttgcccattgactgtgatattggctgtagggttgtcataaatagctcttattattttgagatatgttccatgaatacctagtttattgagagtttttaacatgaatttgtgttgaattttatcaaaggccttttctgcacctattgagataatcacgtggtttttgtctttggttctgtttatgttgatggattatgtttatttatttgtgcatggtggaacagtcttgcatcccagggatgaagctgacttgattgtggtggataagtgttttgatgtgctgctgaattcggtttgctagtattttattgaggatttgtgcatcgatgttcatcagggatattggcctgaagtgtgtgtgtgtgtgtgtgtgtgtgtgtgtgtgtgtatgtgtcttcctgattttggtatcaggatgatgctggcttcataaaatgagttagggggaagtcactccttttcaatttttccgaatagcaaaaagaacaaagttggaggcatcacactacttcaaactatactacaatgctacactaaccaacacagcatggtactggtaccaaaacagacatatagactaatgaaacagaacagagacctcagaaataacaccacacatctacatccatatgatcttcaacaaacctgacaaaaagaagcaatgaagaaagaatctcctattcgacaaatagtgctgggaaaattcactagccatatgcagaaaattgaaactggaacccttccttaaaccttaaacttaagactttaaaccttaaacataagacttaaatgtcaagccccaaaccataaaaaccctagaagaaaacctaggcaataccattcacgacataggcatgagcaaagacttcatgacaaaaatgccaaaagcaactgcaacagaagccaagattgacaaatgagatctaagtaaactaaagagcttctgcacagcgaaagaaactatcatcacagtgaataggcaaacaccagaatgggagaaaaattttgcaatctacccatctgacaaaggtctaatagccagaatttacaaggaaattaaacaaattcacaagaaaaaaacaaacaacccaatcaaaaaatgggcaaagaacatgaacagacacttctccaaagaagatatttacatggccaacaaacatattaaaaaagctcaacatcactgattatttgagaaatgcaaatcaaaactacaatgagataccatctcacaccagtcaggatggcgattattaaaaaatcaagaaacagtagaagctgaccaggctgtggagaaataggaatgcttttacactgttggtgggcatgtaaattagttcaaccattgtggaagacagtatgacgattcctcaaggatctaaaaccagaaataccatttgacccagcaatcccattactggatatatacccaaaataatataaattattctactataaagacacatgcacacatatgtttattgcagcactatttacaatagcaaagtcatggaactagtccaaatgcccaacaatgatagactggataaacaaaatgtagtccatatacatcatggaatactatgcagccataaaaggaatgagatcatgtcctttgcagggacatggatgaagctggaagccatcatccttagcaaactaaaacaggaacagaaaaccaaacaccacatgttctcactcataagtgggagttgaacaatgagaacacatggacacagggagtggaaaagcacacaccagggcctgttggggggtgaggggtgaggggagggaacttaaaggatgggtcaataggtatagcaaaccaccatggcacgtgtatacctacttaacaagcctgcacattctgcacatgtatcctggaacttaaaggaaaataaaataaaatagaaaaattttatgattcaatttgtactcaataaaataaaagccagggctgacatttattaacaagcattacccttttcccttgaagcaatctctctgtctctctctagctctccttttttattaaagagaagtcatagtgagaacaacttgtgtgaaaaataagttttaggcttattatggttggcttgtgatatggcttgactctgtgtcctcacccaaatctcatttcaaattgtcatccctcctggtgggaggtgattgtatcatgggagttgtttcacccatgctgttttcatgatagtgagttatgaaatctgatgattgtataagtgtttgacattttatcctttatacacagacacacacacacacacacacagtctctcctgtcaccttttgaagaaggtgcctactttcctttctatcataactgtaagttttctgaggcctccccggctatgcagaactgtcagttaaacctcttttgtttataaattacccagtctcaggtaatatctttatagcagtgtgagaagggactagtacagcctgagtattcacttaaagtgcagaaacaattaattggtcatataggctcctcttaagttgggtttgttggaatttacctaaaattaagttattctagtcaaagcctgggtaaaataaccagtgtctccatttgtcccattttacaataaaagatgtacttaagcaaataactatattgtcacctaatcagaatactcacagctttcaaattatggataacctagagaaaaataaacttgctcacaaaaacacacttcacccaatttttctaaactataaataactcaaaataaaaacatttgcttgactcttctttaataagagcagtggctttcaaacacaatgtcatttgtttatcttggaactgctatccacaagccaaacagctcctgttagatgggaaccgcctatcaagcactgtagaatatgtagcagttcttcacatagttagagtcagtcctatgggaaaacagaggctctttgcttatgagtattattctccttgcattcctcaggtagcaagatgctatatcaaaagtatttgggtccccagcagggatttgggccaaaggactcagggcatttggttgatcttcatcttatttgtctcaacattgccccaggcaatattatcttcctcattataacttttgccttttgattaaaaaacattttctatctggggcaaataacgactaagtattcaaacatatctgtgattcttctggggcaggtccttggacttccttttcctttcaatttttttcttatttccctaatcatttatcaagcatctttaagagccctgagggacagcaaatttgataaggcttctctatcatatgattgtgctgaagcaatgttaaccagagtgccaatgaaaaaggggccctttcaactcctaaatttcttattgcatgagtccaagccacattttgaaaagcctgctggaggagtaaagaagtttctgcaaagttcaatccacccccaatcctccaatgcccaggtagctctgacggaacctcccctgcatccagctccagccccagcccagtaccattggatccctgacgttccttacagccaaaagattcaaggagtcagtccacccacgagcagaggggaggatgtttctcaagaatgagacaggaagtgcagaggaaatgcacttgtcctagaagacaaggccagtcacggtggcatagcgctcatcctaggcaatccacccacccatgaggtgaaacatggagaccgaggaagcttacctgtctgagacacgtatggaagccaagagctccagggtcatcagacctgcgcaatccagcagaaacaggtttggagagagaaacagtcatgacacgaatctccaggaattgtctccctgatggacggggaagtgatcttcatagaagatattcagccagaccaagaggcatctaggccgctgagaaacaggggagacagtggaagagggaggacagagcagaggccagagcccaggcaggatacggcgccgtgccaccgccacgggcataaggggaggggtgcgaagcgggtggcttgtccatagaggccagcgttccagggacagggattgttgccgtctcccattcccggcttcctcttcaagattgtgtcatggtgtggcttcatttcgcagagaagaggcgtggaaaggtacaaccatcttcttggacgtgggtctgctcctctcctgccggacaatgtgctaccgtggggcttttgtcctgggctggagtgtggtcctcttgatcctagaaaagaggccgctcaggatggggatgagacttccattgctccggccagacgcatcccctcaggtgatcgaggccttcacagacccaaagcggaaccgccgcgaaaacgatcgacagccggccacaggacccagggaaagacgcagaaagaggctcaccaaagaccgaccgacatgcaagaaatcgctttctgacgcacagggcacattcgtccaaacacacacgcacaagggcacacacacacacatagaaaccgacacagagagggaaagaaatagagagtgacagacagcgagagagaagagaatggcgcacacacacacacgcacacggtcatacagcggtgtcatggaagcacccccacctcaggcagcaggcaatccttgaggctgcagggttctgctctccacgcgaacgaccctcgggtgagagagaagcccacggacacacaagcagacctgtcctccagatcacgggggcacgacttttggggagactcacccgaacaccgtccgggcaggcctgaggatgggatgccgcgctgcttccccggcctctgcctgtggtttcctcatcctggtcggcccatttcaggtcctggcatccggagacgctcctgtggaccccgtggagaagtcaggccggagcctcggagccccgacaccgaagccctgccacggagggctcctgctttgccaagccccagggagtggtttctatgacaaccctgggaatcgctgtgatggggagaagcggctcgctcctcgcgcatgcgcattgacttggccaagtcttgcgtagctcctggaagtcaggctgaggtccctttaaacaatggcagctgcgcggaggcagtggggcggttcttgctgcagcagcggtggcggctggatacggggcccagtatggggcggcgtgggagaggggaccgcggacgtccagtaccaaaccgtgtcacctggagtgactggctctccaagggccagctggccatcgtatcctggagatggtcaacaaaactttgaccctgaccagaaaggaaaatgctggcagtgccctggactgacgacagccaggacatatcacgcttacctgggaagggcccatacacaaaggctcctggagaagcacagggcctgtcaccaagatgaacaacatctggggattgtgaccctggggactggctatgtgggtgtactgtgtgagctgccccaaaatgccacccagaaagtggaaatggccctggaaagctgtagcagggaaacccctccctggtgagttattctccacctgcctccctctgttcctggcagccttgccccatctcgattttcaactccagttgtgtctgcctggagggtggcatggccagcgttagtatctccttctgcagctcagtgatgggctccagcagccctcaccatgcctcagaacctgagacccttagggaaggacaggacatgctgcaaacacaaacccggtgagagagggtcttccggccacagaggtcacaggtaggggtctatagactccagttctgagttcctgaccaggtttcaaccatgagcatgctctttaaccttattatttcttgtcattcccatctgtgacatggagaaggcacccacctcagaggttttgtgagcaataaatgaatacgattaatgtgcctttcctggtgctacacataaagccaggcatgagtcctcgtgcagttgccccaccatgtccaggtcccacaggctagtccagaccccaacattgggccagttctcaacagatgcctggatgccaggcccccctggagatactgggaccctggcctgggcctggacagaaggtgttgctgtgccatttggagatgaccccataggtgaggactggggcctatgtggccctgtgaaggggtgtgccctaaggcggggcttgggtgcctcactgggaggccacaggatggaagggcaggcaggtgagacccaaggccactctataccacattttgaacaaacccgtcactctccacctgcagactcagctatgcatatttaagacactattgggcccttagttaaaaaatattttgcttgcacactcagcgttctcatccaacatcaatggggaatcaaaaatcctttatttggaaacaagtaagggaagcaatgttgaaaatttgtcatggctccataacccatatctcctctggggattaattattttcttaaaatgcagtgtgtactgttagtttaaatcatcccaactgtgataacactctttaaatcttcagtaaaccttcacatttaaaccacctgcagatgagagtaaatccgtcaggtgagaggagagtgagcactcactggaggtgaaataaaatcaggtaataagaacttagactgtggtctctcgacacctcccgccctccccatcagaatgtggcagctgaacaaggagacatggcaggcctggccacagtgcccagtggggttgcccaccctagctcttaggaaactggatacttggggccagtggccacccagggcctgttgtccacctgggtcctaggggtaaacctaagacctgtgtccacctgtgtcttaggagtaaacctaagacctgtatttcccctggggcctgatgtccacctgaagactggagttcacctgtggcctactgtccaactggggcctgaggtcactagggtcgtaggtatccctctgaggcctggtgcccacttgtccctgatttctccctggatcctgggtatccacctggagccatatatccatcacaagcctggttaccttcctgggacctgagcatcaactgggggcctaatgtacacctggagttcagtgtccacctggggccagagttctatgaggagcctggtctttacctgggggctgtctctctctctctctctctctctctctctctctctctctgtgtaatctcagtttctatgaataattttgaaaaataactttctgggttttttttaaattattgctcttatacagttaaatttcacataaatggacacactgatttgattctgtcttctcattttttcgtatcaccttgcttcagttgctttattatttctattcatcaccacttaaagggccaatcacaggataccaaaaacgacttttaagaaacagtggtaaagaaacattaatcaaaaaatatgaaaatctgtaacataagtataattaaaagtataattttgaaattttaatttaaacaaatgggatagggaaataggtagaaaattaattttgactagttctttggtaagccagtacaataatattgaaaatcaaaagtaaaaaagctgaaaaggatataaataacatggtcaataactttatctaaaagtatacaaatgtacattcaacaaagaaatatagattttgtcatgttttcaaatgtaggtcatgaattagacaacaaaggagtaatcaatgtattctaaaccatcaatatcatattgtattcctcaaagccagcaacaattaaaattttcagatatttggaaatcactaagcccattattaagtaatcttgaagttagaaagaaaacaataggtgaattatgaaaacaatgtagtataatgataaatacctttagatatgcaagtttttgagaatgcatttaaaacagaaattggaggtatatttctaactttaagtacattttttagaaaaaactgaaaatctaataaaacaactaaatcatccatctgaaaacctagaaaaagcatacaagtaaacaaaaagcataacaaatttaagaaacaaactaagaaacaacagaagacaaaatattaaaataatttttgatattagtagcaacactaattaagaacataaggtatgcagatgaaacagaattttgaaaaagctattaatagagatgtaacagataaaaaatgtggtcttcaaatagcaggaaaaaatttttatcctggttcctttcacaaattcctccaaactctcaaagatacacagaaagcaacaaatatgaacaaacagaaaatagaaaagcacaacaaactagacctgttcatttcacactctcctattaggttggtgtaaaagttattgcggtttttgccattaaaagtaatgtcaaaaacagcaataattttccaccaacccaataacaatcttttgtttataatttgcctttttctgcatatgggactaattcaagtatttagtttccgtttgggcattatgatcagaatgggtttgtgggtggtggatatacagactgttggcacaatttgctatgtatggtttgctcttagatatccagatagagttaccaggcagtagtccatcacctctctgagtctggaggtctgagaacagggtgggtgggagaatatagcgagaactctgtgaggaattagatatgggggttacgcccttgacctacgtgtagccagcaagccctattcaatgtgctgagtttagagaaaggctcagacaagggcctagaggatgggcaggagaatccgcaagcttcccagggttctgcctgggccagggccttgcccagcacagccttgaaaggacagaactggggtcctgcagcccacctctgtgggcacctggaactatgaccatcccacctgccctagtgtagacagggcctacaggagatgaagcctccgttttctcctgtatataatgtgaggtgcttagagcatgaaaccacagggttccacatgctcggatagtgtttgttgaccttggttttttatgaatgaccctgtgtgtactgagacacttggaaaaagctattcactctgggggtccttcagagcagacagaggcttggtggtttgggtggatgaggatttgggataggacagaatgtgcccaggcactggaccctgtgtcaaaagtctcggaacatgatcaaacctcatttggaagttggggtaaattgctgccctggctgtggtgaggacacctcgagagtgaactttacaccccaggaactggaggcaaagaggggacaagagagactgctgaggtccttcttactgcccttggagcctgcagatcctgctcctctgcctcctgggaacctggagagccactgacttgaggaatcttaaatgcaggtccctgttttgttctgtgatgctcctgcctcaggctgcagtgctgatgctggctatggggtgggtgggaggacagtgttctgtgttcctggtgcccactgagctgttctcatgcatctggatccaggggagagtcatgctgaggtcatgcagttcctgttcttatgaatgatctccacattatgaggtggccagaagcaggaaggggcatttgacatcctcccatttattcactcagcaactctgcccttagcattagtcttgtgtgccaggtgccctggtgggcccagcatatggtactgaaaatgtccacgtggtccctgaccctcaggggttcacagtctgaggacaggtagacatcaagccccaagttgatacctaggtgtcggatggacatcacgccccagatggacagcccagccagaggtagacttcaggtcccaaatggaaatttggccgtaggtagatatctggccactggtggatagccagtcccaggtggacatcaggctccaggttgacatcagtccccaataggatatctaggccccaggtggatacccactgcgtacttgtaaattgtcaagactgttttttttttttaaagcaagtgagagctatcataaaacatgataacttttagtagattttgaatattcctaaactccatgagaaatcataatattttaaaaatcagcgtgtatatggaatgagtatttttaaatgtatctttcatgttaaaggatttagaataaaatgttacaaaagttatctgtgttattcgtagaaaatgtagacaatgaaaaaatcagagactaaaaatacctatatttttggctatgagataatcgctgctatggcacattccttctaaccttattgccatagattttttatacctaatattgattttatgccacacatttcattacatatgcaatggagtattacttattcattactaagtcacaaagagtttgattgtgtgtatatttaaaaaggcaaaggagataaatttacataattcaggtttttccacttagcattttatcaataaacatgagtggttgagtgcatatgcatgagatttggttctgcatttatttcggatggtctcatgtcctatgtgcttatcactaaatatgatgctattgtaaaccatatgcgtttatttttacatatgtccttaaaggaacaaaaacatttacctttgatgttaaagcaaataaacaacaacaatctgttctaatgccagaggaacagcaaactgagggtgattgtaaaattatatatatgaatacctcactttagaggccacttaatttttttccaaggggatctttgactatatgtcatttgtattttatttaatgattttataatttaacccctaaattataaatctagaatttagaaggtatatttccttactggattacatttttggaaataatattttatatgtgtacaaatattacaagtcattgtagacactggaaaagtatattattatttaaaggcaataaagattctacaataaactggtataccaaataaaattgttggtgcattttttccagtagattttgtacatattacatatttaaccttttttattcagcacataatttttgagtatttactaagtgtctgcattacgaactgagtttaaggagtgaaataacagacatggcctcagacattaaaaattaaagttaggtcccctatttatatatttaaaaatggtaattatgaaaacttgttgagatttttacctagacaacgttacaataatacacttgatgttgttaatatttgcaagtgagcaaaaaagaaaataaaaagatggtttaattcattcaatgtacactttaaaattgcagaaaatagtcatttctttgctttgcaattgaatgtctatgtgtttttctctgcaactttctctggagtgagagaaacaattattcatccagcccaataaaggcagaagagtaacaataaatctaatattttaaatgccaatcaaaagatagtaaacatattatttcagaatactgaggtcaataagttgacctacaaaaaaagccaaagtgacagtataactgaataaggaaaagcccaaaagagacaaaataccttttgttttgttacctcggtatgacacaacttaccctaactataaagatcctaaattaccaagatgggtggcttataatatgcagagtaaacaaagtcatttcacttttagcatttttatttctctaagaataaaatgtgtatgaggaatttataaagaaattgacactatatgttaatactacaatgagcacttttcgagaaaagacttttttactctcttaccaacatcatgttagcagtatttattttctccagaaataatgcggcaataaaaatatcagtatgtaggtaaaattagtgtagtttcttaaagaaatgggttaggtcacaggctaattatgtgtatttcactggtttttgaatgcctacaatcatatactttacaaggcacagagaagattttccaaaaaaacaaatatgtgaacctgaaaagtaattaccacttggtagtgacaatatggatagggtgaagggcgtcatcaggaagcaatgaaaaagacacatttgcagttaaatttgaaaaccatgatgtttaacacatatggtaataaagaatattttctcctgtttcaaaattattatagaattcaagatagaagctaaaatacctagggataatgatatggttaatcacaaattaaaaattaaaggatattttgagtattataagttaagaatgagaacttattacccaatgaaaaggggataattcattatgctccatatccattgaattaaaaggccccataacctgggtaatttaaaagtttaattttatttaaaagttttgttttgttcatcaagctgaagggtttgcccccagaaatattctaggattgcatatccccaactctgtatgaagtatacaaataatgttataagggccaccatctaaatttgtaaataatttagtaccatttcatttgcctttgtagatttaaacatgtaaatggctttctcatattaggaaacatcatttttcaaaacccagataaacataatatattgcaggagaataattatttatttattaaaaaagaaatgctggatgctaagtccaaaagacataaattattttacactaatagctactaacattttattcattaacatataaaggtcaaagattttaaaataatctttaaatgattagcaacacgttgatctctttttctttttttcgtaaacctttttgagtcttaaaaatactaaattatacaagcaatattaaatattaaattcaataaacttgaattaaaatattcaaatttactagaatatgcacattggaaaaatgaaaataaacagaagcataaagcagcatgtgtaaaattaagaaagctactgagagtgtttaaagtacatattcatctgtagtctaacttctgccataaataatgagtcttctcagtaaaacacaaattgttcatgaagggaaaaaacatgttgtattagggaatattcaacataatttttttagtactaacttgtgccccgaattttatttgtttttgtattatgaacttatgcacttgataatttcttttttcataaaaaattgtatttacaactctattcaaaagcagtttttttttttttttttttgagacagagttttgctcttatcacctaggatggagtgcaatggtgccatcttggctcacagcaacctttgcctccctgattcaggcgattctcttgcttcagcctcctgagtagctaggactacaagcatgcaccaacatgcctggctaattttgtgtttttagtagaaatggggtttcgccatgttggccaagctagtctcgaactcctgacctcaggtaatccgcccaccttggcctcccaaagtgctgggattacaggcaagagccaccatgcccggactcaaaagcagtttttaaaagcaaacaatataacaccaaagttgacaaatctatgctcaccgagttttgccaggtttaaaaaattatttacagaatatggcatcaaaaataaggcaataacccaaaatataccattaaagatgtatccactcctacaactagaaagaactaatctatctggtagcaaatgatacttcattcagtttcagcatgtctgaaatcttttttttttttttgagacggagtctggctctgtcacccaggctggagtgcagtggcgcgatctcagctcactgcaagttctgcctcctgggttcagccattctcctacctcagcctcccaagcagctggattacaggcgcccgccccaacgcctggctactttttttgtatttttagtagagacggggtttcaccgtgttagctaggatggtctccatctcctgacctcgtgatctgcccacctcggcctcccaaagtgctggaattacaggcatgagccaccaagctcggcctcagcatgtctgaaatctttaaggacaaaagtgctaaaacattaccttcattcttcattagactcttagaacacttgaaggaaaataatttccaaagcacaaattggtaaagaggtgtaatctttcaaaaagatattcagtgttcaaaatccaagaatgcaatatcaggctgggcgcggtggcttacacctgtaatcccagcacttcgggaggccaaggtgggtggatcacctgagatcaggagtttgagaccagcctggacaacatggtgaaaccctgactctactaaaaatacaaaaattagcgaggcatggtggtgtgcacctgtggtcctagctggctggggagctgaggcaggagaattgcttgaacctcggagttggaggttgcagtgaaccgagatcatgccactgcactccagcctgggtgacagaataagattccatctcagaaaaaaaaaaagtagtatcgatatacacagctaatatactgaatgaaagaaagaataatttgaagaggtatcttgatgaaaaaggagtcatgaggaaagttgtattcatgtctctgaatgaaggaaattgcaatgtgagaaatagtactatgactactatactaaaagcttattgctaacctgtattgagttattaacatgtgttaggcagagtaccatataatttaaacgtgttatctcatttattgtagttagtaaaacataattttgaactctgggattataaatgaattaactggaataaacttctatttaagtggtcatctgtaaattgctatctaggaacagggtgatatagtgcccaagttttctaagtattcttactaactgttgtttttctcggatattgctcttttttggtcattttgatttttttttattttagaaaactaataaattcactcttcttggtactgacccttgggtttcatagaagaaaaagtagttaaattctgtacctttacttttatttcattttttctcttttaaaattatttttaattggcatgtaataattgtataggtttatgggttacagagtgatattttgatatatttatgcaatgtgtaatgatcaagtcagagtcattagcatatccattaccaaaatcatttattatttctttgcagaatattaaaaatcttttcttctagttatttgaaaacacacaataaattccctttaactacagtcaccctgcagtgctgtagagaactataacttactccttctctccagctgtaattttatatgtgttaaccaaatttttcttatactcccctttctctttcccgtatatggtaaccaatactctactatctaagcttccatacgtaagtgagaacatgtagttatgtggtgtttctttctctctctcttttttttttttttggagacggagtctcgctctttcgcccaggccggactgcagtggcgctatcttggctcactgcaagctccacctcccaggttcacatcattctcctacctgagcctcccaagtagctgggactacaggtgcccgccacctcgcccggctaattttttttgtatttttagtagagacggggtttcaccgtattagccaggatggtctcgatccttaaaatattctgcatttgtcatttgctcaagtctgaatgatttggttagaaaaaaaacttctaaattttatttatagaagatcatgatctgaatttcatattcccagagttaataaacaaatatagttgataatttttcacagctgaaagatagccattatgatatataaaatagaaaaaagtgaagatttatgtggtttagctgagtcaatgagtcaaaaatgtggaatgctgaaaaaaaatgaaatattttatcccattcatagaagcacttcttcaaattataattttcagagatgatcatagtacactcaaaattaatttttaaattttggtaactgcttgaataaggatgattgagaaactgcagtgtattaagaatgtaatagggaactaggaacatcagccctgactcatatttcacccgtaactactgaaaataataaagagaggttggagtgacatgattcatatagttgaatgactatcatgctgaaaatttcattttattttaatttcttaattgaaggataaaattttatgtatttattttgtacaacatgatattttgaggtgtatttacatcgtgaggtgactgaatctagcttattagcatacatattaccttatattgttatgaattttgtggtaattaacatccaaaatatatcagaaattcaaacaactcaatagcaagaaagcaaatgaactgattaaaatataagcaaaagatctgagcagacatttctcaaaagaagtcatacaaatggccaagtaggcttatgcaaaaaatgttcaacatcactaattattatggaaatgcaaactaaagctccactctgctgtcatctcacacctattataatggttattatcaaaaatacaagaattaaacgtgttgatcagggtatggagataagggaacccttgaacactcttggtgggaatatattcagttcatgtaaaagtaattgcagttttgccattacaatcaatggcaaaaacttcaattacttttgcactaacctaataaattagtacagccgctatgtattaaatattaagtattaggccgctaagtattatggttctccagaaattttaaaattgaactactatatgatccagtgatcccactgctgggtatctacctatccaaaggatataaaatcagtatatggaacagatatctgcactcccatgtttattgcagtattattcacagtagtcatggtatggaatcaacttgtgtccatcgacgggggaatgggtagagaaaatgtggcatatacatacaatgaaatacattcagccacagaaaagaaggaaatcctgtcgtttgtgaaaacatggatgaacctggataacattatgagctaggccagaaagacaattatcacatagtctcattcatatgtggaatctaaaaaagttaataagtagagtaaaatgtttttttttgccagcagctaacgtggttgggaatggagtttggtagatgttggtcaaaggatacacaactacagtcagagagaaggagtaaaagttcaagagatctattgtgcaacgtgctattgttagcaacttaatgtatttttgagaaattctgagagtgggttagtgttctaaaccaaaataataactatgggagatgatgctggaaactaatggaaacatttctttttgtatgaagacaggactgtgaacaagggtgattgtagcattgttggttgaaatgcagatgaaggccattggcttctttcaatgttctttaagagctttggaatgtaaggaaccaatgtggcatggagaaaaaaatgttacacatggtgtcagaaaactgagatgataaacttaataaatgcttgaatttcggaagataatttacatgtctcaggatcagttacttcataccaaggtttatacgtgggttattaggaagtctgatttaaataatgtaagtgaaatgtctgaaacataagttattctcagtaatcttatagttatttaatacaacattttaatgggcatatgatattgatgaaacattaaactatattttaatattttaagaaaatacttttataaaggagtttcattcttgttgaccaggctggagtgcgatggcacgatcttggctcactgcaacctctgtctcctgggttcaagctattctcctgcctcagcctcccgggtagctgggattacaggcatgcgccaccacgcatggctaattttgtatttttagtagagatggcattttgccatgttggccaggctggttttgaactagtgacctcaggtgatccacccaccttggcatctcaaagtgttgggaatacaggcatgagccactgcagccagccgaaaataattttattacatttaaaatactaataaaacttatttaatctacattttcttatattacaaaaatatggttgtaatatgaattcagatggtttacatgttaaaattactaacctctgtggctgaaaaagttacctataaatgttcattgcctttaattgatattcattcatatatgaaaatatatcacactaatcaaattgcagatgcagtaaaaaaaagcaaaactgtgctatgagttttgaacaccaatttaatttgacagaacttaagtgaccagaaagaaaatagaattatttgcaactgcagaaattgctgctgggttaaaattgacattgaaaaagcctaccttttgacgcccccctcccccacattggcaactgttggaatcagttgtcatgctcccaaggcaaattattgtccataatatcacaaaaagtaatgagagcaaaagaatttctgtaagaacatgaggctttcctaagcactaaactaacaaagcttgaacttagccaagaaatgggaagttgcagacactgcacattagcaaaatgtcttggcagaagatggacatgcagaagtgcaatcactatcttatttattttccactctaggggacactaatatgaaagtgactaatattggataatcattcccagaaccaattaaacatagcatgccatttcttgtggagaatatttcatgctcagggaaattaaaccattttattatgattaagtttccttagtcaaacatgctttaaacttacattctcacactgttaactaggtgggtatgaatttactttcctatggtgtacaggtgatttctggagaaaaatagccgaagtgctcatgtggaatggaactagagtgtggttctttttgtattctactttgcattaactgaaatatttagtgtattgatcccacttcccaaatgaatgaaatggagttcagaaagcttacgtgatttgcaaattgaggcagagctgataagacacagtgttgttttggcagtgcaagtttctgacttcaaatccgtttagaccacacagttttatctatacagcataattatgacaagatgtaaaaaatcaaattctaaaacagtagactatattttgatgatgctttactatatgatcaagaacaatgagtaaggatacatttaaatgactttagtgtttcatcagtttaatttttatgactgcattgtgaattataggcatttaaaacttattttaattgtattttccaaatgtgaattggacaaatatttaaaattgttgtattctcaccacaaaaatggtatgtaaggcaatgcatatgttcattagctagatttaatcattccacaatatatatacttcaaaacataatcatgagtgaactcccattcacaattgcttcaaagagaataaaatacctaggaatccaacttacaagggacgtgaaggacctcttcaaggagaaatacaaaccactgctcaatgaaataaaagaggatacaaacaaatggaagaacagtccatgctcatgggtaggaagaatcaatatcatgaaaatgaccatactgcccaaggtaatttatagattcaatgccatccccatcaagctaccaatgactttcttcacagaattggaaaaaactactttaaagttcatatggaaccaaaaaagagcccgcattgccaagtcaatcctaagtcaaaagaacgaagctggaggcatcatgctacctgatttcaaactatactacaaggctacagtaaccaaaacagcatggtactggtaccaaaacagagatatacatcaatggaacagaacagagccctcagaaataacgccgcatatctacaactatctgatctttgacaaacctgagaaaaacaagcaatggggaaaggattccctatttaataaatgatgctgggaaaactggctagccatatgtagaaagctgaaactggatcccttccttacaccttatacaaaaattaattcaagatggattaaagacttaaacgttagacctaaaaccataaaaaccctagaggaaaacctaggcattaccattcaggacataggcatgggcaaggacttcatgtctaaaacaccaaaagcaatggcaacaaaagacaaaattgacaaatgggatctaattaaactaaagagcttctgcacagcaaaagaaactaccatcagagtgaacaggaaacctacaaaatgggagaaaatttttgcaacctactcatctgacgaagggctaatatccagaatctacaatgaactcaaacaaatttacaagaaaaaaacaaacaaccccatcaaaaagtgggcgaaggacatgaacagacacttctcaaaagaagacatttatgcagccaaaaaacacatgaaaaaatgctcaccatcactggccatcagagaaatacaaatcaaaaccacaataagataccatctcacaccagttagaatggcaatcattaaaagttaggaaacaacaggtgctggagaggatgtggagaaataggaacacttttacactgttggtgggactgtaaactagagttcaaccattgtggaagtcagtgtggtgattcctcagggatctagaactagaaataccatttgacccagccattccattactgggtatatacccaaagagctataaatcatgctgctataaagacacatgcacatgtatgtttattgtggcactattcacaatagcaaagacttggaaccaacccaaatgtccaacaatgatagactggattaagaaaatgtggcacatatacaccatggaatactatgcagccataaaaaatgagttcatgtcctttgtagggacatggatgaattggaaatcatcattctcagtaaactatcacaagaaaaaaaaaccaaacaccgcatattctaactcataggtgggaattgaacaatgagaacacatggacacaggaaggggaacatcacactctggggactgttgtggggtggggggaggggggagggatagttttaggagatatacctaatgctaaatgacaagttaatgggtgcagcacaccagcatggcacatgtatacatatgtaactaacctgcacattgtgcacatgtaccctaaaacttaaagtataataataaaaaaataaaaaataaaaaaatagggcgcctctgcctggccgcccctactgggaagtgaggagcccctctgccaggccaccaccctgtctgggaggtgtacccaacagctcattgagaatgggccgtgatgacaatggcagttttgtggaatagaaaggggggaaaggtggggaaaagattgagaaatcggatggttgccgtgtctgtgtagaaagaagtatacatgggagacttttcattttgttctgtactaagaaaaattcttctgccttgggatcctgttgatctgtgaccttacccccaaccctgtgctctctgaaacatgtgctgtgtccactcagggttaaacagattaagggcggtgcaagatgcgctttgttaaacagatgcttgaaggcagcatgctcgttaagagtcatcaccactccctaatctcaagtacccagggacacaaacactgaggaaggccgcagggtcctctgcctaggaaaaccagagacctttgttcacttgtttatctgccgaccttccctccactattgtcctatgaccctgccaaatccccctctgcgagaaacacccaagaatgatcaataaaataaataaaaataaaaaaataaaaaaaaataaaaaaataaacatcatattgtacacaatatgtgcaacggtatctacaaattaaaaatgaaaataataataataaattatgtcaggcaaatattcactgatattggaaataatatttatgcatctcattgactcaatttatactaaaaggcaaatagccgtcttccttaataatagttgtagtattttcatagccatctgtttatctctgcagtttactgtggagcaaattttcatacttctcttcaacactcagaggaatacttcaaagaaaaattgagacatgaaagttggttgaaggttttatggggtaaactgggttatttgtggatagacgtcatagcacacaaccgtgtagcaacttatactgaagtaccattcagatatctcctcctcacaaaacgtcttctgctccctcgatccctttctttaggcatctcctggtctctcatgggaagaatatataataatagtcaagagggcttgggaggaaaacagactagtgttggctaatccattacatactctggggaaattgtttgaaccatattcacaccctgttaataaaacctatcccatatggttaaaatgcgcatccaataacatgtctttaatgtgtttagcacaacatccagctaactgtaccaattgtgataatggtaacaaagaagtggtctgaagcaaacagagagggaaagcccttattccacttccataatctccatcattcttgccccaaagagtatgtaacatacaatataattaaaaaggagtataggacatttaagatttccaggcttatcttctgaacaacttgccattaaattcttctgctgcagatattatagacactttataaagtaagcactcaaaatcctcgtctccctggtcatcctcatgtttgtttgccactggcatcctagagaatgaactggccttctcaataacatttttttttggggggcggagtcttgctctttcgcccaggccggactgcagtggcacaatctcggctcactgcaagctctgcctcccgggttcacgccattctcctgcctcagcctccccagtagctgggactacaggcgcccgccatggcgcccgtctaatttttttcgtatttttagtggagacggggtttcaccgtgttagccaggatggtctcgatctcctgacctcgtgatccgcccgcctcggcctcccaaagtgctgggattactggcacgagccaccgcgcccggccctcggtaacattttgacttgatctgtcaaggcgctttcgtcagtgcttctgggccgcggccgccacctacagcctccacagtgcccggcgtcccggagctggctccactccagttcctgagcaccaaggctgcagaagctgaggcccctgacggaggcgccaaggccctgggggtggttgcttgagtcccgagcctgtctcctgaaaggccaagggtggcctgcacctcgctgacagctgttccctgcactgttcagcccctcctgggaagccagtgacagcccctgcagcatgcactcagctgctcctgccccgcaggtggggctcatttgcctccagccccactccagcccctgagactagaaggaaccggacgaggaggtgtgcaacctgaccaaggtggtcctagcggggagcttcgctccagcgctcttccggggaggctggctcacttctgggacagtggccaacccaggcctgcgaccacctgctgagccggtgaccgacgccgcctgaccctccctcgcccgccagggtccaacgcccgctggacgaatccctgctacacagagggctctggtacctgccgtgcctcatttaacggggcgccagggccaggcgcctctggctgcgctttcagccccaagacttctaaggcttggaccccgctgtgcgagctgttcagtgagatctgctgctggagggctgggctgcatctaggaggggttgatggtgtctcatccctgcagtcctatggaaagaggctgtctcagagaggggagatgggcaagccagctgtggatactcggctggatggcctggacgcagccctcaacagcttggaggagaagctggagggctaggtacccacagaagggctggaagcctggccactgtcacataagtcaaggagtgtccccaaatctcccagccccagaagctgaccctgaagggctaaggccagcattgggagctgttcaaggaacccatgcaatcctgccatgagagccaggccacgctccagtgcacacctgccccacaccctaggcagctcaacctcaagggctgtgacggcatttctggtgttagtgtctctggctgtgagttctgcatccaactcaccggaggcaagcgacccccacctgcggggcagaagcagccgggtgcatgctgcaggggctgccgctggcttcccaggaggggctgcaccgtgcagggaacagccgccagcgaggtgcaggccttccagcagacaggcaccgggttcggcaaccacccccagggcagtggcgccgttgtcaggggcctcagcctctgtggtcttggtactccctccacacccccaaccctgcacttccacaaaagttcaaggccaagcagctcatcccacggatcctggaagccctcagaatgtggcctggctcttaccgaccaggcccatctgtgcctccatcaggcctggcaatccttgcctgactttggcatctactacctcatggtcaggctcaagagcagaaaagatcctgggactcgtcaacaatcaacagttcacatcgacttgacagttggtgatgtggtgacctgggtttcagcgatatgtggtactgggatgtcaactgggataccagcaggcggttatccacatggccttcagctgcgtgtttcccatctgtccagttatgcacaaccacttgaggggctacattttcctgttgatccagagtgggaccctggggaggagctggatgaggggatctcttcctgcagctcagggatggcggccttctaagggctgtctgactgcccctgtcctgctcatcctctgcggctaggctcccaagcccatacccactgggtctggctgccccacacctgctccaggcagtcactgagctgggcatgttcacctggtgccactggctttgtgcaggccagggacctggctgagccagactctgccatcatccaggctagctagggacaggggtcctgagctcacagagtgcccgcttcccttgtcaaagaggctgaggccaacacccctgacctctctgtagtccctgagcacacaaagaagtccaactctaactatgggatgatgagtcctggtttcaaactgaagtttatgtcttcttacttttaaaaactagaaatcactgtaattccccaagaagataaggtgtcatgaatgtattttttaactgtcgtagacttattgaagtgagttttgcagttctagtaatccacaggacacatttaaaaaattgaataatctacctttgtttcagtgtcggttactgatcttggtacggcattggaaagtaaacatgatgtaaaaaatcgctggtcttatataatttatattctagcaggtaagagaaacaaactgtgtattagtagaatatacagtgcatcaggtggttctaaggaggaaaacaaagcagggcagaaaaatgaagtgcttagaaaaagttttagtaatacgattaaggtaagcaccactttgaggaaatattcgagcaaaatgatgactatggtaaatattcattaggaaaaaatggaatttttgtaaaatgggagatgatgtaggtgaagaatttgacagttgtggatatattaattttgggatttccattaaatagttaattggagatgttaagtaagcatttaaacatataaatctgaaactcaggggagagttctggcctggatataaaatgttgaaaatcattgctatattgttcttttgggcatgttcagctgcatgggtgctggcaaggattagacacacagacagttgcatttaaccaaggttgtaattttggcagtagagctgaataaagcaagggaaagacaaatgaattgaagttgcataagctctagaaatttcaagttgataattaacttcaatttgtttgaggaagatagatgggaagcgaagggttatggatagtaaaaagttgatagaaacagtagatcattgtttctgttgaagctcacactttgtttctagatatattgttttatggccaaatggagatactagcataaaaaatagaatggtttttattaaataacattaaatggaaaagtgtattttgagttgtcactttatataaaaaagttgaagagacataagagttatagtgatttacatctttataaggtagttttaaagagagatttggggaatgatgaaggttaaatgattaacacacaaactaagattaaatgagctgggcattgtgactcatgcctgtaatcccaacattttgggaggctgaggtgggtggatcgcttgaccccaggagtttgagaccaacctgcgtaacatagtgagaccctgtctctacaaaaaatacaaaaattagccaagtgtttttgcatgcacttgtagtcccagctactgaggaggctgagttgggagagatgcttgagtctgggaggttgaggcagcaatgagttatgattgtactattgcactccagcctgggtgacagactgagatcctgggaaagaaaagaaaagaagatgagagaagggagaaaaggggaggagaggggagggagagaagagagaggaagagaagagaacgaagagaagagagagaagagaagggaaagaaaaaggaaaatggaagagaaaagaaaggagaaaggggaagagagaaaataaacaacaacaacaaaaacaacaatcaaatcaaacaacacatagatttactgaagcagaaagaaagacctgagtctatagaccaacaggttggagctccagatgacagtgctgagaaaaaaaatccccatggaatcacatgctaaagaatatgtgtttgattaggaactccagagaaggggtagatgccaataatgaaatggaaagagtaacaaggttagaaaaaggaaattaataactagagtgatcaataaccagaggaaaaaacccacaaggtaaaccaataaatgtaaaataagccagaagaaataaaatcaactacagtagatcaattgtataatgaaatgtaaacagatgaattcccattaaaagacaaaggtcagcttgggtttaaaaatacagtgataactgggcaatatggtgagatccccgtctctccaaaagaaaaaaaaatacaaaaaattagctgggtgtaatggtgcatgcctgtagtcccagctactgtagaggctgaggtggggggatcacctcaaactagaaggtcaatgctgaagcaagctgtgatgttgccactgcactccagccagggcaacagaacaagaccctgtctcaatcaacaccaccaccaacaaaaaaacccagtgatgtatatatacaagaaaaacacttaaacaatgataatggtggaaaataaaagaatgccaagagataccaggaaagtgcaaaagctaaagtaaaataaagagtggccataataataatagaagggtgaaatttaaggttaagcactgaaatgggataaagagggacaccatgtaatgataggcacaattcgtaatgagagaacactcgaaatctgcatgctcccaacagcatcacagtaaatacaaaaagcaaaatctagtaaaagatgagatttatagagaaaatttatagagaaaattatagagaacactcaaaatctgcatgctccccacagcatcatagtaaatacaaaaagcaaaaactagtaaaagaagagatttatagacaaaatttgagtggaaggctaaatctctgttagaactacagtaaaagcctcctcccccaaaggatacaaaagaagtgacagtttgaataaccaaaaacttgatttggtatatatgggaccttatatcccttaaatagaaaatatatattttttctatgtctatgaaaatcttagaaaaatcatttggccacaaagaaattcataataaattttaaaagtggagagtttacaaatttggagaaaatgaatgctttcctagtaaaatataaagtgcccctaatgaactagataatgagtagaaacttaattaccactgacgagaaaaaaatctgccactgaaaaaagcaccaggtccagacggtttcatgagaaggaactgtagaatcctttagaattcacctccgtcaacaccttcctcctctgggaagcactcctggatttccctcttgctgacaagatcctgggagagtggcttctccatcatgtccctgacacagcttcttgaagatgtaccatatcatatcataaccatatgatatcatatctgcataccacatcctaactggatttgatggccaatatgtcctggaaaataagctacctgagtgtaggaatcacacttttttattggtttctagtgcctggtacagtacagcagctgacactggctgactaggtgaatacggtaagtgaaaaagcagaatgcacaatcatcagtactctgcgatgcccttatgggaaatccccaagacacacacataggaaggagaataaatgaaaagaaaccaaaatgctaacagtaatcagattgagatttcccccattatccaaatatttatgatgtagttaaacaatttttatagggtgaatagtaatttatacaaccacctgggccaaggagtagaagaggaggaggaaggctcagaggatcttcaggcaggcccttctgctacctcggcttcctttctccggccaggtggtccagccgccaggcagacatgaaggccctgacaggggcctctgccccaccaccttcatgcctcataggggacctctagctaggaggaaggtgatgagacagggtaggcacccaccaggagcctaagctggacagaagggtcccgtgggtcttacctggcccaggcagcagctctggaaattctatcaacactagattcctccaaacagagcctcctaaattttagcaagagctcctatgcccttcagccccagggccttagtcctgtcagccccatttccccctcaatataaaccaacagccactgtcccctcactctgtggcccagatccagctctgagtctccctagctttcgggcatggagccccaactgcattcctggtgatcagctactcctggtcatgaccatggactttcctatgtcccggagcctggcactgaccatccatctaggctggcattccatactaatgcccacccctccctctactggacacagtcagctctaggaaggggagagaaaatccatctagaatgagggcaactgctgtggctggggaaagatgcgacagggcagatgagcttgtcctggtgcccatctcaggcccctgcaggctgcagggagccagggactaagaggtgaataacaggtgcagccttcagggagatccccagaggaccatgggggctgaagggaagggaggggtggatggagagagctcttggtggacaggaatgtgaagtgaagatggagggagacccaagaacctgctctctcagaggtcagacactagacaggcagcagggcttctgggtcagcctgggtctgcaggtgagtcaggggagggaaaggttgggccaggcgtaatccagctgaaccacccagggtggcttctccagcttgggggtgggggagttgttgtaggagggagcacaggcaaggggactcactggagtcccctcaacttggcttcagcttcctgctgataccagcttccctttccaaaggcccccagctggccccggagtagaacagatgggtctgtcctgaagtcagtttctttctctcaatcacagtgactttgggctgcccttggagtttgacctaggaagtgggtgcagggcctggatccagagaggaagggtcactggatggattataggatgggggaaggggaggaccaggtggaagttcaggagggaggggagagagtgaggaaactgctgtggccctctcctggtccttcatgggtgagggctcactcacagttcccagaagaggaggaggaacaaggggtcccagctccttccagtccaggctgccagctcagatgtggggcctccagagctgttcgtataagaagttgcagcagccaggctccactggcctgggctttctccttttgaggcgggattgatgactgcaccctgaaatccccgagtcaggactgcagcagtggagaggaggctcagaggcccctttattctccgggcttttgcctggcttccctgggattcctgagtggcctcctttgagggaggggaagagttgtccctgcttaccttccccttgccaccctctctctccttcaagagggcttgctttctgccctctcctagggagccaggaaacaggagacatccctctcctgggacatcaaattctccaactacaccctcagctgcagatggcaaggtcacgatttggaattcatgtctccttccctgctgcccatgcccacaacagggctgggcacacagaggatgatcagaagaatgagcatgtgcttgcctttggcttgtattcttcttgccgagtctaacagggtggtcaaccctgatggccacctggctgaaactgaacgtggtggcctgggtgggttttatgggcaggagacctggaactgtcctagacacagccatttcctggcagcatgaccttcggccagtcactaaacctctctgaacatctgtttgtactcaaggcaaatggaggtgtctatgtctgccttccaacttgttagaagcttaaccctgggtgcaagcctttgagtaagaggccacagtactgttagcccctttgggaatgtgtcttaccatattttatgtcccctgtgtccaacacagtgaccagtacataccaagtactcaatatgtgaaattagagtgcatggtgaatgacaagactgcgccatacatggcaggagctcctctcttctaggggtctgtgggcttgcccagtaacctgccctaagccatgagccgatgcccaacagacaggtgtccccactctccaatgaccctgtgtcactgccaccctcacatcgttgccccctctgttctgctccacctctcctttcttaagagatcccttctcagcaatgatctcctgcccatccacctaaatttggggatatttccatctatgaccctacaccccctctatccacaccatctctctccccttctgcctgttgtctacactctcgatctgcatcctcaccttcactcctgacccactgtcctctgccttcagcaacacccttgaccagctggccttctggtggccacattggataagtgtactatggcctttatctaacttgacctttctgtagcccccttcttctggacacttcttgccctttgggccagcactcttgtgcttctcttccttgatctgtgcctgcttcttcctctcaggcttctcttttcctccctttgtctggcatctaccttcaggcaggcccggtgtttcctccatcctactcttcctcaattcatctcccctcagtaaatagcaccactgtctgcccatgagtgcaaactgggaagctagaactcggtctgatttcccttagatgcccctcgaccaccagaccctgcctactctacttctcaaacctccggtcattgccacgtgcccatggtaccaccaaggaccttagccattcttgcagccctggccatggagattttttttctcaatctcattcccttctctgctaaaagccttacaatggccacaggaaggcatgcacattcctggcaagggcccatgagaccatgcccaggtgggcactagctacttgcaactccctactccactcttgaacccgacccacatgtcctctcctgctggcctctcatctaagagggtgagacccccaggaccatggctgtgtcttagttctctctagatgcaaaagcttacctgggtcttggcaggtgttcaattagttcatgcctaatgattgggtgaacggacctggaggatcatagtggggaaaggggatagagagggctggcttttcctgaaccctctgaggagataacaggcaggcttacctttcaggatattccttcccaaaatgctgctggaaaatataagatcggggtggaggtccaactaactcccaacactggaccttgttggggatggagtgtcagggaggcccacagctgactcctgaataaaacacagtcacagggactgtggtattattgtacccatcacttagtgggggggaggggaaacaggaccagacatgctgaatgacttgtggaggtcacacagtaaattagggacacaattggggtcaggaagcagcctctttggccaatgtcctagttccttcctgcaaaagtccctggccccatcacctgcacccctcccgcacaggccactgcaaccatgaacctgctgggagccagaggagagatgggcagaggcactatccaacagggaccctggtactgggatgtcttctcagaagatgctgggacctgggatgttggcccttgggcagacctgcagagcactggctcataggtaaagggctgccactcctccaccctcctcaacacacactctgtgcactctgtctgagccagaccctgggccagaagtgaggttcaaagggcatggccatttcccaacctccaggggcacctttcagaggggcagacactcccaccatcaccaggacagagaatgtggagaggtctggaagtttgccaccacgagcctgtgcacgaaacagaggggtgccaggacaagagcactggcatccagccacccatcccagagatgctgcctggtcgactggcaggggctccagacagggaccctcctagtccccatgccctcctgccaggtgctgttttccagcctggtcacaaggtgacgggctgcctctgcaggagcctgagggaaggtggcacagacctggagggaagcagaccgaggcctacccagacagtctgggtggaccatctgctgctgccaagcacttccaagcctctccttgcataaggctcacagcaaccctaattgtgtattgtgcttacacatagggacgttgggcctagaggaattaagtggctgtcagcagctggcaggtgacccagcggagtcaaattcaagttttcctagtctcaaaacctgaactctgcattataatgagaagggtggatggaagacccattagcaggctcaggggaatggtgcctccttcctctgggcatccgggactcagtcctggcacatggcaggcatcaatgttcattgtaatgacatcaaatacaaagaaagaaatcaaaggcacccaaggttcggaggtagtctgtccaccccactccctttgggctaaagaacaagccaaggccttgagaaagggagtgaaagccaggaaaacagaaagccatctactctatatatttaagtctattcaacacatgcataaataatggaattaataatataaaatataaatgactgcaaataagttgacaaattgttgaatgttatttgctagaacatgaaagttaaataataaaagttggggaataccaaaatatcatgtgcttttttatctgcctagggagactgattacttaatccacttctttttaaagctttatgagcactcatatatattttaactttccgaatgaaaagataatattcatacgatgaatgtgagggtttcctgttgatcttcctattgtcttttaacaacaaaacaatctttcaaacataacaatataaaacaaaaattatttgagtatctagcagacttctcttggagaaagaaatacactgagacccaatttgctgcagagagtgagattccaaagcatatttcagaagaaagaagagaaattaactgaaagaaaaccttaatttccttgcataagaaataaatgcagaagttccacctctagaatggcaatgtgaagagttccatggatcttttataaaattgttgaaaattataaaacaaccatcacctatgtcacttgaaaagtcataatggtacatagaaaatgatgaagtatttattcaagaaaatctactgaaactcactaagaacagtgagagttttttgcgtttgatccacaacccattcttacctctttttctcacagcctatcttgatacaaactctactcaaggcaatgtagccaagaacacaggatttttactagaccccattggggggctatagtatctttctgggagtagcagtgcatcagaatttttcatttcaacccccacctgctgccactaccttttcttgaggttaagcttttgttgaatgtggccaagaagtaggatgtcacttcttcctaccagctctaattcatggaatgaggactgtttaggtgcaacacactgagaacactgagccctgattgccttctttctggtttgtctgtaaggcaaagttctcattccaggagtggcaaagctgagattaccaaaggctacttctcatcccagtgacccagtctcaaagtagggctgtcactctgagaggagaatgctgctctctttgctgcaatcaccagagccaaagctcagaagttttgcccaaaggaaggggcagaacatacagcagagagtgtaaagcttttcccaaaagaagagtttggggaaattcaaccataagggtactttgaaaaacgatgaagtgatggtaaaaagcaaataagagagactggcactttattagagacatatgctttgaaacaaaggtcagctagtttaccaggaataacccaggaaaaagacagctaagaagagcccttctggtgtcaggaagaagttccaaatgctgaacaaatgaaaagacctgaaataataaataagactgctaatataacaaaagccgtaaatacatagtacatttctttttatctttttaagacataaaattatgtcaagtgtgttagtctgttcatgctgatacatatatataccagagactgagaaatttgtaaagaaatttatttctcatagttctgcaggctggaattttaagatcaatttgctggcagttttggtgtctgctgaggtgccttgaatactccatcctccagagggggtgcatgctgtattttcatacagtgaaaaggatgaaaaggcaaagggtcctaatgtcctaattccctccagcccttctatacactatggatggtataacacactcataccatccataaggacagagccctaataccctaatcatatcctcaaggttccagctcttaatgctgtcacattaaaattaagtttcaacatgaactttggagaggacaaaacaacaaaacatatcatcaagtaacagttataacaataaattattgggtatatagcatatatagatgtaatgtgtacagccataatagcacaaaaaggacagccaaagtacacaacagtgaacaaaagtaaaatttatatatacatatatgccactagaattgttatgcacctaaaatcgattgtgataagatgtctgcagtaaaccctaaagtaacaattaggggaaacattgaaaaaatatagataaaatattattaaatttaaattaaatgttttataaaaaatacctaattcaaaagaaagcagtaaaggaggaatagaggaatgaaaagacataaggtatacagaaaactgaagtaaaatgatggatgtaaatctatactagtaacctcaagtgaaaatgaatttaaatattcaaataaaagattgtcagactggaggaaaaacaaattaaataaacaagatccatctacatgttgtctgcagaagacacacttcagatccaaagatgaaaattcatagaaaaaaaaggatagaaaagttatatgatgcaggcagtaaccacaagaaagctggaattgttacattaatatcagaaaaaaacagtctttaaaacaaaaggggttacagaggtaaagagagatatttcataaaaataaaagggccaatatctcaaaaataaataattacgagcatacatatgtgtgatgaaaagacttcaaaatccattgacatagaaacctccaaaaatgaaggttagacaatttaacatacttcttgcagcctttaatactttcacaaatggataaaatgactaggcaaaagatcaacaaagaaatagaacacttgaacaatgctataaaataactagagtgattagacatttaacactgtaacaacagtagattcgcaagtgcacacgcaacattatccaggaataccgtatcccaggccataaaatagacctcaatgaatttaaacattggaatcatacaaagtatattttcagacaacaattgagtaaaataataaatcagcaataggaaaatttgggaaactcagaattatgtggcaattaaacaacatgctattaaataaccaatgggtccaaaaagaaataagataaattagaaaatactttaaaaattaaagataaaatactttaagaatgcataatatctcttatgtcatgcaataaaagtagttctcatactcaaaaataacattctctaacctgccaccataaggcactgaaaaaagaagagcaaattaaaactacagcaaccacaaggaagtattagggatatacaaattagtgaaatacaaaatagaaaaacaattgagaacctcaacaaagccaaaaattgtttctttgaacacatcaacagtggccacaatttagatagaccgaccaacaagaaagagaaactattcaagtattaatgaaatttttaaaaggacactaaacttaaataaaaaattattataaaagtacctatgaacaattatatctaaaatttagaaatttttaaagaactggacaaattctaagaaaggttcaaattagcaaaaatgagtcaaggagaaatataaaatcttatcaagtaaagagataaagttagtaatcaaaactaccacctcaggaaacaatgacaacagcaacaaattcgagccaagaatgcctctaccaaactttcaaagttgaattaatacaattatttaaaaactcttgcaaaaaaaaaagagaatacacttcccagtttattctatgaagctggtattaccctagtaacaaaaccagacaatagcatcaaaaaaaaaaaaaaacaaaacaaaaacacagaacaatatcttcaacaaaaatagatggaaaaaatcctcagcaaaatgctaatgatcaaaattcagcaatacataaaacatatactataatcaggcaggacttatctcaggaaggcaagaaaaatgtaaaataaatgcatcattacattaactagagtcaattatattttcattttccctattgattacctcctaagttgcttccagttttacagtatttcgtactgccattcctagactcatatctggactgtttcacagtatctactttagagaatatagagggataatcttggaaatagagaaacaatattgttcattgattttaaaatcatatatatatacatacacacaaatagtcaaaaagtcattttagccaaaatgaattccatgtcaatgaaaatgaaataacgaaatgataccatcaatcaaaaagagatgagaaaatggaggaaatgaatattggaaaatagagtcactgccttaattgttggatttctagtgaagcaggtaaacaaattaaattctcttctgtagagttatcctatctagggccacatgtctttaacctggcaccaacaaagtactaaaaccatataacaaaacattcttttattaattccttattcatcaaatgattttctggtatacatttgggtcctcatgtaactatctagaaagaacacttttgttaatttaaaaggaatatttcagttcctacagcatttctttacattaactggtttaaacaccaatctgtgtttgttagtatacccctaacaaaaactggattaataatcaggtatctgggcaggaaatgctgtgcctcggggtctactagcagcgagtgagtaaggaaatggttctttgtgtctttctgtagtaaggcattcatagcttctgttttacaaagcataattatagctaccaatattttggagccatagatcttcagtaaaaggctatatttgtgtgcagaacatttgatataaaaagttaaggcttccagtcttattttgttataacttttctaattatatggtattgtattttcagatgagtacacacaatgaaaacaattaaaaaaacaaaattaccattcagtttgccttctttccatcaaattggtctcatgtcatataaacatagtttattttagagatgcagtgttcctttctattcatagcatcatcactcaagatggtaattattatggtgaacacttgggtcattacactggattatcctttaacagattgctatgaaattggatcttatccttaagctccaatgtctgtatggccctgataatgttgaaaatgcagtcctcattgtacctaaccttaggaaatgaataaatggctatttggagtcctggctccctttgtgcttttatattcctgagagcgtagttttataatacttcacagaataagactaattgtgaaatatttggatgtaagttgatttggatgtccctgattacacaacatctgcatgtaagacaacacactattttcaattatgattttgtcaagttctcaaaatacaggattgacttttaacagaaactgtttctgtgtgctggcataataccatttgtgctattttcttatatttattctgtatattaaaaagggatattaattaactgaaagggtttttgtgcttactttagacaataaagaaattatgaaagtttactcataaatatggtggacagtcatttcataacaaagtatgacctaaatgtctccccaagggtaaagatcattcaagcaaaactatctcctgtatcagtatttattcacctaaatagactgttttggttaaaattttaatgaaaagtcatgcttatattactatataattttgtatatgcatggatatttatctgttcaaagtagagatgtagttgacatgaagggatgtctgcctagttcacaaaagtatgaccacgaaaatatcatttctatgatactccctcattagggagctatccctttctcactccagccttcaaactgtaatgtcagagatcatagtatctacttccctgtgcagtactttttgatccaagtaatagatccatgatctgagaatagtcaaagtgcatctcagatttttcaagagttggagagtgtgaaggtttcacttctgatggtatatgttgtaagaatgagtctgtatctgtcagtgccaaattaagtaagatggaataagaataaaagctgatgctcagagaaaggggaatgagttagaggtagtattgactatttaaaatgtgtcctgaggtcagacccacaaatgcattttgctattttatttcaatactgataaaaccttcttttcatggttatagttagttcaaattagtttttttcaatttcaattgaaataacaggtgtaaaaaaccacaaaagtaccccatttccccttgcaaatgtattgttctgaagctagactgatgttgaaatactcgaggtcaacctaaaatgatactgttttactgatgccttcacttttagtatattttccttagatttcacaagaggtaaaaacatctactatagacgtgttacaccttttgaggttgcttgtagtcttcatatctggtgtgtgtgtgtgtgtggctgggacagtggaacacgatggaaagactgaaaatgatacaattccaaaaagctgtttttacagtgtgaagcctagcctcagagtaaaatcccaatactatcacgcaaaaaattactaggtttgcaccaagtatgaataggttggaaaactaaaaaggcctatgaggccctataagaaccaccttattagtgtttaataaagataaagtacaacagaaataaaatgcaggaaatcattgaatgtctgtctttcaggaacagagcctttctccctaaagatcctttctcagtctcacggacacagtttatctgtatatattatgaaccttcaagatttgagcttactataataattaaaggtaagtgcagaaaagtctttacagcaggctccctcatacattgttggtcatatacttcttaagccaagttgtgtaaaccatcaaactaaacattctcaacgatgtagaccagttggcactaaacttaaagcaacattatgaatcactaactagcacatgccattttcatcttgctcacgggtcagtgttacacttccgatgcatctctagatgtaaatatcaatataaatatcaagctgttccagtccaactgtaagagagccctctcctatgtagccatacattaacatatgagaatataagatgtgttgaggaaaaagtatcaaaggattgagaaatctacgtaaattttaaaaagaattaaaagaagaccaggctatatttaatgtcatcaaagataattctagtgcattggcattattttttcacgtgccttttctttcttttccccttgactgattctctcctaactagttttaagcaattttatagaataatctgcgtataaggcacacattttagtccagttcagttttacaaatttataaagctaaccacctacacaatcaaatatagaatattcccttcacctacacatttattgcacgacctttgccaatgaattcccttcaaccccagaaaagttcaatgcattttgtctttatataatttcaaattttatttacgtggaagcatacaatatttattatttagtatctgccttctttcctctagtatatgataaaaattcactttttttttttttgtacaaaggaatgacaatccttcaattgtaaaaactaaacaacatgccacccaactaatcacattccttagggtatatttctgaaatataagatacattttttaaaagaactttattaaaactcagggctgttaaaagtatatatacaaatacaacactaaaaaataaagttaggtttccaggccgggctcagtggctcacgcctgtaatcccagcactttttgaggccgaggcaggcggatcacgagttcacgagattgagaccatcctggctaacacggtgaaaccccatctccactaaaaatacaaaaaattagcggggcttggtagcctgcgcctgcagtcccatactcgggaggctgaggcaggagaatggcgtgaacccgggagtcggagcttgcagtgagctgagaccatgccactgcattccagcctgggcaacaaagcgagactccgtctcaaaaaaaaaaaaaaaaaaaaaaaagcttctgcaaagcagaggaagcaatcagtagaatgaaaaaacaggccgggcgcggtggctcacgcctgtacacccagcactttgggaggctgaggcgtgccgatcatgaggccaggagatcaagaccatcctgggttaacatagtgaaaccccgtctctactaaaaatacaaaaaaagtgtcctggcgtggtggcaggcgcctgtagtcccagctactcgggaggccaaggcaggaaaatggcgtgaacccaggaggcaaagcttgcagtgagcagagatcgtgccactgcactccaacctcggcgacagaccgagactgcgtctaaaaaaaattaaattgaattaaaatttaataaaaacgaaaccacccagataatggaagcaagtatttgcaaaccatgcatcacacaaggggttcatacacaaaatacataaagaactcaaactactgaaaagcaaacatacaaatgatcttattaaaaaaatctaccccaaacctttgtcccccaccattatttccctactttcttttccaaacggcctttggccccctccctctcaccaccctttttctttcaccatctgcccccaaacttcatcattttttgcccaccctcatttcacaaagccgcctctactctcctgctcaacacccttttccccatccatctacccaaaccctttccccagtttcttcccaccctcttttccccttatccctggccaccctttttccccgtcccgctctcatcaccctcttttgctcctttatctaagcaaaaacattttccccagtcttttcccaaaacactctccactcctgctgctcactaccctctttccctgcttcatccaaccaaaaactgttttcttcgtctttccccgttcctcgccattctctttcccttctccatctacccaaaaacatttccctccgtcttttcacaaagccgcctccccacgcctattcacctccctctttccccctccatctacaccccaaaactttccccaccatcttttcaaagtctcccccctttaccactagtgctcttttttcccctccctctaccccaaactatttttccgttgttttcccaacccccatccctgctacctctcgccaccctctttcctcctatgcatcaccctctttcccccctccatctatcaaaacacttttcacccaccgtcttttcacaaaaccttgtcttcctcctgttggctaccctctttttccttctcccacttgctaccctcttttgctcaacccaaaaactttcccccctcactgtattttctccccactatcttttcacaaaaccttctctccctgctgctcgccccattttcccccatcacctccctctttcctccgcccacttgccaccctcttttccccctccatctacccttaaactttttacccaccctctttctgcaaaactttccttccctcccgctccccaccctgtttttacacctccatctacccaaaaacttttttccccaccatcttttcgctgccatctttttgcaacgtcttctctggctaagctatccttttttccctttggccctaactaccctctttactcccctctatctatcccaaaagtgttttccttctcctgcccgctccagccgcgctgctctctccgtcactgccaacaaccgcagtgaggcgagccgcgctcccgcggctccagccaccagtatacggccaccgactcctgattcctagtcctctacgttgggcagcaagaactcaacatgaagatacaggaacttgaaaaaacgtggtcctgcttcagcatcatttatatactgcggtaatgcccacggaggttcctggactgcatgtcttgattggatgagaaaaaagcctccaggcttactctgattggactttatgatcatgttctgattggatgagagcaagtcttaacacaaccaatcacagcatgaaaataaagtccaatcagagtaggcctagaggtttttctctcatccaatcagaacatgtagtccaggaactgcatttgcataacctcacatataaagcatgctgaggtggcgtcaggtcatttcaggctcttctgtgtcgagcggaggagtagctctgtgtcaagcttaggggactggaagaggccgcaaccttccgcctgctggagggtggaggatggatggagcctggagcctaggtcactaccttgctgtggttggtggtggcgatagagcagtaggagagcggtcagcagcaggaggactagaaggaagaggtactgccacatgctggaggctggaacctgtgccaccatggctcgcctcgctgtggttggtggtaacgtcggagactgcagctcagccacggtggtagacatgtgatggggtaggtgagttttctgggcctgccctgtatgtctctgggggcaagggttgggtgtcctattggggttcaccgctagaggctaccctgcctgtggcagtggtctggtttggggcactctctgggtttgcattgctggtggtggggcaggttgcctggctatctggggttatactgcccgtggtggcaggggtggtcgggggaggcagattgtgtacactagcttgtattgctggtggctgggataggattaggggtgctatctaatgctgcactgcctgcggcagggagtgggttgggtggagttatccggggctacaatgctggcagtggggggtggtttaggggcgttgttgggtgctgcactgtctgtgactggggggtgcaccattaggagctgaactgcctgtggctgggtcagattgtgggcactattgggtggtatgctccctgaagtgtgtgtgggggggcttttgtgggggggattggggttacattgcctgaaactgtagggagtgttggatgtgctatccgggggctacactgctagtggcagggggcagattaggggtgccatgggggctacactgccagcggcattggcgagctgaggaggtggcagcggcagcgacagcagtggcctccttcttctcgtagcttccaagtaagggatcgttttcctcttctcagactccagactctagaaggcgattttctctgctcgagctggattgcacggtagggcctccacacccactgtggtttcttggtctgccctcatgctttgtgttgcgaagaccacctgggactaccgggcagggagtagtatgcaccatgggggaagtgggagacagggcactgtgggtggaggtgtcaggaatgggaatcagcccttgggtggggagggctggctgggtctgagtttctcctactcaggctcctggaggagggcagccttggtgggcccagcaattcctggccagctggacttggccaggggccggtttcagtgaaggcactcgatcccaccccaggccccagttcctggccagcttttgccagaaggagaggttggactttggaaggtgggtgtgagtgccttcaatgaaactgatccctgacacccagtcaccagcataacgaggtgaggctctaatggttccaatccctgagtcctgttttcggcttttcttgctttgcctgcccagctgctccaagccaggctgaaggaggagaaggagttgccgcctgtggtacggtcgagcagatgacgtggctctgcagcttgcctcatgcagttggtgttggagatggagaccacagctcgactggagcggtaggagggcacccacgggggcctggtggtaggatcctggtagggtgggctggtacgttgaggataactgcttgtattggcatcggcgctagtggtggtagcagtaggaagtctgggggccgggaagggggagtaggagcactgcagggcccaccccgttctggggtggggaggaacctgtgggtgctgtaacgaaggcctcggtggcagtggtggtggtacacctaggacaaagaggagtcctcccccttctcctgcaatctctggagtgtgccctcctcctgctggtgcctgagctaggcgtgagtggcagcattatctcattcttaacaaaatttagagggtgactatttgtgtatccttttgcttgttttttgttgtgatactcttggagttactcaaattttatgaatcgaggaggggataaaaagtgtcatatgataggccttctaattcccacacctgttctttttcctttcttccattgtgtattttcttctcattttcttgttcctcttcattttcttttgctactactatttcatgtttgtattcttgtttctcctcctgtttttgtatttttatgccaagcaatagccttaacaaaccaaaactgagttaaaaataaaatacttgtcactgttgtgttttttaaataactgatcccttactatgttttagagatgaggaaaaagaaatcagttgtataattagttacttgaatagctatgctttcataattgtgttagcccacttatgcctagtgttccacgctaagcatgtggaaattatttatatcttactgttaaatgtcatcgacaaggtctgatttttcacttacgcaaaaattcaaaaattgcaacctctggcataaatgggctaatgtgttgtgtcattcaaggaatcaaaaaatgaaacatcacataaaatattggtagcaaaacagccatttcatctctgtcacatatttttttctggagctatccaagagtcacaggggtaataagttctaatttatgagatgattaagtgaaccatattcccttcattttttttttctgccaccattttcaagagtattgtcatctgcatggcaaagggttcatcaccacatctttgcaagaggaaaaagaagaggggagaatcgtgtataatgttgtaaggcaaacattcacaaccaaaaacaaggtttcattaagtttcgcctttaagaacctgcagtgtttagccctctttgattcctagtattattacctttggtatgaactcttttattaaacggatcactctagaagtttatgcgttttgtaccatttttcaagccaacagaaatgtgtaatgcctataattctgacactttagttatttttaaggctatgaacatgtaagatactgttggtatatggaagaatatgtataaatatcactaggtagcttattttgaagagatagtatctaaatttttgtccagagtagattggttgcagtttcttaggtgtgtttcttaatgctttgcctcaatgttttaaagcatgtagaaatttgaatacagtttaactgcgtatagttgtttatagatttaatatttctaaagactaaagacatcacagctccctttaagattcagtaatgttaataaaattttagaaatatagggttagaatccaacaaattcggaggaaaattgttaaattatatagctgtagagcaggaatgaaacccaggttctaagctctaagggggccatgaggtaccatacaggtgcatcagtgactgggcatagattcagcaaaattacaggatggttaagagagtgagttgtggagcccaactctatgtaacatgaatttttaaactgcatggtgcctcagtttatccatctttacagtggggactgtagtaagtttttctttttctgctcagttgtctgtcttgttgccactgttccctagtctgccttgttgccactgttccctagtctgtcttgttgccactcagtgcccacatgagaggatctaaggtaatttctgacagcctgggactccttaaagaaaaacagaaggtgctacaaaacccattttaggagaaacctctattgtcctcatggaaccccaagaacttcaggcagacaggtctctctcaaaatctgaggctctcctctgttttgttttgtgttatctgaccttttaggtttgggtgggcatcagaaatcagtcggggagagagatctaaagaaagttgtggatatgaagatgtatttatggtaagaaaagttatgatggaaagaaatgttatatgagagaggatcttgtatggcaaatttttgtcctaaagtagaatgactaattatgaaagagggaaatacaggaaaagtcagaaagttcatgtcatagatggtctgtggaatttgtgttagggttcataaaatgagaaagaaaaacttaccactgctagatcttttcctgtctagaagtgttgtgtatatgatgtatatataaaggagccctaattacttggcttagaagaaaaggaaggctcttaaatattttgtcagaaaaatagaatctctaatgccttttatttcacatgacttcagtaatctttgggaaatgaagacagtgttaaaatcattttttagtagaaacagcgtttctctgtattggtcaggctggtctcgaactcctgacctcaggtgatcctcccgcctcggcctcccagagtggtgggattacaggcatgagccactgcacccggcctacaaataggttaaattattttataaattagctgttgtttgttttgcctactttcagacttccggatttttttttaagtatgaggaatttcaattgttatattaatataaaagcttagataaatagcacaaacatgaatttttttttttgacagagtcttgctctgttgcccaagctggagtgcagtggcacaatctcagctcactgcaacctccacttcccaggttcaagctattctcgtgctcagcctcccaagcagctgggattacaggcatatgacaccatgcctggctaatttttgtatttttagagacagagtttcgtcatgttgtccaggctgatctcgaactggcctcaagtgatctgcccgccttggtctcccaaagtgttgggattacaggcgtgagccatcgcacttggctgactgtattctttatgaattttttttacatcaaaaagctcatttgtaatattttctgtatgtattcatgctataaaatttattttgttttattttaactttttaaaaatagagatagggtctgattgttttgcccagcctggtcttgaattctgggctcaagtaattctcccaccgtggcctcccaaagtgctgggattacaggcatgagccaccatgcccggcctataaaatgtattgtaaaggaaaaggcacatttttattaagctgataatctttacataaatactgaagcatggcatatttctttattttacttgggctattttatgttgcattaagaagaattttttgttttttctttttactatgcttgtttctggaatactcctttcctcccttatcttccaaactctgctacatctaaatttatcctatttttcaagggtttgatcacatattacatcatccaggaagtgtctctcctgttccctcttctccaaaatgtatattttttttctagaaactcttgatcctttgcctctagaccataagccctttgtaggcatgtctgtatctgagtttttaaatttcatttcctcttttcccactcccagaataacaccttgtgcccgggagtagcagatacttgttgaatgcataaaagagctttgcagctagagttagtgtggatgctgtagaagatgtctgatacacatatggcagtttgatgctgaatagtttttggaaattaaaaaacaggtagaaatttcaccaatgtcagtgactaacatagctgtaattagtaaattatcaaaatatttctttttttttcttttttacagagaaagtctctctctgttgcccaggctggagagtagtggtgtgatcatagttcagtgcagcctccgagtcctgggttcacactgtcctcctgagtagctgggactacaggtgtgtgccaccacacctggtcaatttcttttattttgtagaaacagagtctcattatgttgcccaggctgacctcaaattgctgggctcaagtgatcctcccaccttggcctcctgaagtgctgggattataggtgtgggccactgagcccagttaaaagcatttctttaaaaaagaaaaaaaattctgtttattgggatttgggggaggaagagaaagtaaatatgggattggttcatcctagacagcactcatggttctagataatattagaatgcaataatgttttaatttatatatgcaggaaattttggagtagtttcaatcctaggaaaaaactgggagttagaaatatgggaagattggccggcacggtggctcatgcctgtaatcccagcactttgggaggccgaggcaggcggatcacgaggtcaagagatcgagaccattctggccaacatggtgaaaccccgtctctagtaaaaatataaaaaaaaaaaaacaaaacaaaactagctgtgcatggtggcacgcgcctatagtcccagctactcgggaggctgaggcaggagaattgcttaaacctgggaggcagaggttgcagtgaaccgagattgtgccactgcactccagcctggcgacagagcgagactcccatctcaaaaaaaaaaaaaaaaaagaaagaaatatggaatagttggttgattataatagaatttaggattccctttgaaagaataatatcgactagtttatataaaaaattaaattcttaagtagattagtcaggagtaaaggaaaagtcaagattcccaacttatttggatttctttcccccattacagcgtactcgaggaacaaaatttgggctgtttggctgtttttattctttgttatacagaaataaactgatatcaaaaccaaacatattgaggttatatttttctttcctttcttatttttttttgagacggagtctcgctctcacccaggctggagtgcagtggcatggtctcggctcactgcaagctccacctcccaggttcacgccattctcctgcctcagcctccagagtagctgggactacaggtgcccgccaccatgcccggctaatttttcctacttgtagtagagacagggtttcaccatgttagccaggatggtcttgatctcctgaccttgtgatctgcctgccttggcctcccaaagtgctgggattacaggagtgagccaccacgcccggcgaaggttacatttttctaggaaaattcgactcagatttatgatgagagtcacctttatgcttatagattgcccctttaccccatacttggttgaactgacagacattcttcttgccattatcactgtcatacactgttcacattcagagtaatttgttttaggcaattcatttcccttggcaataacagagatttatgtaattttgaaaatgtttaagtagtcatcatcatgactttgagtttctgttcaaagatgtttaactttgcattacttttaagatttttaaattcatttttaattagaataacttttatgtatttggaggtatttggaatgaaatcaaaacttatgctatctaggagttataacctaaaatatgcagaacgttaatatacctgatgtaggagtatatacatcctgttgagggggtagaaagaagttactttatattcacataaaatcattttaatgcatgaaggaggatatgctattttaaaatcttatctttcactaagtataagtaatacattattttttatatatactgaaattgaaagaaccgcttcctggatgtaatctactgagtttgttgcatattcttccagtttttttttctgtttgtataattttctgtattatggaatcataatgtactattcttttgtatactactgttccaagtttgtctatttatttcagagttacctctatcaatcattaacagcaacttaataccccatttctagtacatgaaaataccataatttgccagcggcacggtgactcactcctgttgtcccagtactttgggaggctgaggtggctggatcaccggaggtcaggagttcaagaccagcctggccaacatggtgaaaccccatttctactaaaaatacaaaaattagcaaggcatggtggcatgtgcctgtaatcgcagctacttgggaggctgaggcaggagaatcacttgaaactgggaggaggagattgcagtgagccatgcctctgaactccagcctgggtgacagagtgagactctgtttcaaacaaaaaaagagaaaataccataatttgcttaatcaacttatggtcactggatttttttttttttgccagaaaaacaaagctgtaaacaattgtgtgtgtgtgtatgaatatttatgcacatgtacatatgtatatgtattttgtgtacttgtacaaacagctttgtaggatagattcctagaagtggagttgctgaaaccaactccacttttgatttgaattcaaatcaaaagatgtgaataatgtagatatggatagatatttatacattttccttccaaaagattgttgtaccaatttgtaaagctaccagtagtattcaggtatgccccataccctggccaatactagatattacagttcaaaacattttgacaatttaggaactgaaaaaatgtgattctgattggtgttttatcaatcactgttgatgatgaactgtttttaatatggagagagttgtatttctttctttctttttttttttttttgaaacggagtgttgctcttgttgtccaggctagagtgcaatggcttgatctcagctcactgcaacctctgaatcctgggttcaagcaattctcctgcctcatcctccatagtagctgggattataggcatgcaccaccactcctggctaattttatatttttagtagagatggggtttctccatgttggccaggctggtctcaaactctcaacctcaggtgatctacccaccttggcctcccaaagtgctgggattacagacataagccaccgcgcctggcttttttttttttttttttttttttagacagagactcgctcttgttacccaggctggagtgcagtggcaggatctcggctgactgcaaactccgcctcccatgttcaagcgattctcctgcctcagcctcccaagtagctgggattacaggcatctgccaccactcccagctaatttatgtatttagtagagatgggatttcaccatgttagtcaggctggtcttgtactcctgacctcaggtgatccacccacctcagcctcccgaagtgctgggattacaggtgtgcgtcaactgcgcttggccatatgtcttttataaattgtctatttttgctgtttgtttattttctgatggggctactggtttttaacaggttaaaagttctctacatattcactttttttctttctttttcttttcttttttttttttttttgagacagagttttgctcttgttgcccaggctagagtgcaatggcatgatttcagctcacctcaacctccgcctcccgggttcaaatgattctcctgcctcagcctcctgagtagctggggttacaggcctgcgccaccatgcctggctaattttgtatttttactagacgtggggtttctccatgttggtcaggctggtctgaaactcccgacttcaggtgatccgcccgcctgggcctcccaaagtgttgggattacaggcgtgagccaacgtgccctggctttattcacttttttcatacgtgtgcacatatccccctagctattcttttgtaatgttatgtagtcagataaatccaaacccagcactgtgctgctgtgggaacttgggcacattatttaacctctgtacaccttcatttccttgtttgtaaaatggagataatataaatagcattaggcatagtggatggcacaaagtaagtaaataataaatgttagctgtgactcattaatttattgatgtgacttttgtgttttgtgctcaaagtagactttccttgctccaaaatgtaaaatattcatctatctactaaactagaaaaacaaagtgaggaacattatatgcctctatgtgtctttgctttaaagatgaaaacgtatacatttttgcttgtatatcacaggatatatgatacttggaaacattggttgtcatagtaagaagaatgagtgagaggaagactttttaactgcatgcgtttttgtatttttaaaacaaagaagtccccagattgtatttaatacttcaatggtttctttttttccttttccttctctttttaaaacttctaattctttgatccatctggaatttacttctggtataagaagtgagacatattttgggggataaaattgtgtgtgaattctaccccaactagctagttgtgtcagcaccatttagtgaataatctgttttttgccccactattagaattgcagcttttgtcatttactaaatgtgtttgggactatttctgattggtcttgttattttggtctcttgtgtattaccatacactttaaattactatcattttataattttaatacagatggggttagttacctgttcattactcttttttttcagactttgacatttctggtctatgtgttcttctagatgaactttagaatcattctgtgacattcaaaaagaaatcatagagatttttattgaatactgaatattgattgggagtactgaaattgtaggtgaagtttggggaaattgacatctttatgtacttactgtcctgtgttctaatagatttttatgtctctctgtagattttcaaactttgcttcaaataagtcctgtacaaataagtcttgtatatttcttgtttatttattttaaaaaacatcagacccatgaatgggagtttgtttattttattcaacaaatattatagagaatcaaacaggtagtttttattctagtgagagaagacagaatatactcaaataaaatgaagtacgtaatccatttcagattatgataaacctgtaaaggaaccaaaagggtgatgtgattgagagtaactagtgggaacttaccttatatgtaggatggttggaaagactcttctgagatgacatttgaactgggaccttaagtttgaggaggagctagccacctgaatgagccaggaacagcgttcctggtagagagtaaagaaggacgaaggcccagctaggaaagacctggcagagaagggctcctaaagaaactgaaaggaaactcatgttgctggggcctagtgagcaatctagaaagtaaggaggccaaatcaagtagggccttgggtcatcgtaagtagttgagactttatttgcagtgcgtaggaaatccttggggaatctgaagcaggagagtgacatgttctgatttaaggtttaaaaagaacacttggctttttgagttgagaaagtattgaagtgggaagcccagttaggagtttttccagcaagaggtaaggagggtggtagttagatggagaggcctgggaagcttcagagtctgtgcgtgtgtgtgtgtgtgtgtgtgtgtgtgtgttcgtgtgtaaggaacagccaaacaacttgctgttggagtgggtgctactgagagctaagtactgctagctgctgcagaggccgtgtagagcagaacagagctgatatttgccttcacaggtgtttgatagttctgtttgtttctaaggtgtgtaccaaaataaagtaggctaagagcatttgactttaagatttgtggagctcgggggtgttgaggggggtgcagcaaaaagcagagtctgtgaataacccttgatttatattgcttaataacctgtagtctctgttagtgggtcaaaggggaggcagcagcagatgatctttaaggtatctgtctctgagttagaaaaacatagcttgaggaagttatgcagcttccctacagccttagagctaatagtggaaccagacttttaggtgagctcatgcacacaccaagtcttagcacactgcctaatatatatttagagctcaataaacggtaactcttttagtaatatccactcagatattgttatatctattaactcaggccaaatatctacattaaaatttttatcttaatttctttgttcttcttttgtgttaatcaaggagggaattggcatgtagtcatccattttgcttgtgaaatttatttgttctttttttgtttgttttgagatgaagtcttgctctgtcggtcagcctggagtgcaggggtgtgattttggatcactgcaacctctgcctcccaggttcaagtgattctcatgcctcagcttcctgagtaggtgggattacaggtgtgcaccaccacgcctggctaattttttgtattttttttttttttgagatggagtctcaccctgtcacccaggctggaatgcagtggtgtgatctctgctcactgcaacctctgcctcccaggtccaagtgaatctcttgccccagcctcccaagtagctgggattacaggtgcacgccactatgcccggctaatttttgtatttttagtagagatggggtttcacatgttggtcaggctggtcttgaactcttgacctcatgatcctcccgcctcagcctcccaaagtgctgggatgacaggtgtgagccaccatgcccagccatattttttgtatttttagtagagacaaggtttcaccaggttggccagactggtcttgaactcctgacctcaagtgatccaccttcttctgcttcccaaagtgctgggattagagacgtgagccactgtgcttggctggttttgaaatatatttgttcttataagttgagtgagtgagtgttgttcagttcagagaattagttcagtgtagtgccgacataccacagagttctcagttggatattgttacattgtactcctgtcttgggacagcactttatgtagaggtaaagtagcatcatttttctttcatttaagaattatgtatttattattttttgagatagagtcttgttctgttgctcaggctggagtgcagtggcacgatcttgtctcactgcaacctctacctcctgagttcaagtgattctcatgctcagtctcctgagtagctgggattacagacatgtgccaccacgcccggttagtttttgtatttttagcgtagaaggggtttcgcctttttggccaggctggtctcaaactcctggcttctagtgatccacttgcctcggcctcccaaagtgttgggattacaggcataagccactgtgcctggccagaattacttattgaatatgtgtacccatagatttatcaaataattgtatccttattaaaatttttctttcaatatcatactttataagaggtaggataggttaactaaaaagctttttctttagcttccatttgtttctctgtctttaagtaagatgtcatgatgtcagaagaggctgcaaataaaataccttgtcaatggcattcccccagattagatcttaaccaaaagtctgagaagcagtagctttttttcccctcaaagggaagaatgctttagtttattttacaggagaaaatttattccagtatagcaccactctggtcttgtacaaattacagaattcacttagataatttctagtctttcctctcctggatgctggactctgtaataagtttaggaggtcagctttctttaaattatccccaggttggaggattttaggtgtcgggatgcccagggtggtggtccttcttagccttgtcttgcctaacatacttttaaaattggtctagagctggacagctttgtgggaactggtgtgacctaatttgcttcagtttaataactaatattttagcatttgaatgtcatagaggcattgccctatcacatacttttgtatcaggaggttttattattttgtcagttaaaaattgcatgttttgtaggatcctttttctgctttggtgaaatgtaggcttcacctctattgtgacgcttggtggattcattcttgctcatctgaagtggcatctgcggtcctgccacagtgaagtatatttttagcttttttttttttttttttttttttgagatggagtctctctctgttgtcaagctggagtgcggtggcacgatgccagctcactacaacctccgcttcccggattcaagcgattcccctgcctcagcctcccgagtagctgggactacaggtgtgcaccaccatgtccggctaatttttttttgtattttagtagagatggagtttcaccatgttggccaggatggtcttgatttcctgaccttgtgatctgccggccttggcctcccaaagtgctgggataacaggcgtgagccactgtgcccggccatttttaggttttttcccaagatggcttaggccaccttgaacacctttgcataacacattttggttatgcaaaggttgtgggccaaaagccaggagttcctgctgggaggaaaaattgcttgttttttggcaggatagtatttgaaattctgttgttgcaagattttcctgttgagtaaatatgtgtgtgtttatttaatatgagaagatttaaaaaggaacttaaatagatcaatttcattttgcaatattgtattacctgtttgcaatatgtaagaggctagttctgggtttatctgtataattcagttagaagtgctattgtcttttatgacagtgacatataattattactatattattctcatcctaaaacattatgtgttgatatttaagagatgaggaagttgcttataaaatcttgatcagatttcttaaacaattcatagaatttttttagttcatgagtcaaccatgtaactaccctgagttaacgagctttggtgctaagaactgaaattataatttgatactgccacttaaggtgctcccttccccttcagtctgaactttagattctttcatttcagtgggtttcaaatgtaaagtattctgccgaggtatcttagtgagccaggactgaagtgaagggtggagggagggatggggaagggcagggggagactgaaaagatgaatcctaggtctcccattctcactagatcagaatgtttctccattgtaccttttgtacatttagctttcatttaagactttcgaggaaaaccttctggttaataaacaagatctgagcactgttgccctgtatctcatggataagttttgaggaaggtggttgtagtggtctccaggctgcagttcatgtgaggaaaggaagggcttgctttgacctgtaaatttgtatgccagtaggggctaattcctgaacttgctagtgttttttttttttcccccttctgtattgggcgaatagtacttttaaataaaactgacttttttgttttttttttgagataataaagttaaacttcattaaagtcataccacaaaactagggcaacaggaaggattactgagatgagggaaaaaatggagaagtcacttaacttgtgactttgagtgacattgagtgtaattgttgaactcaggactcaccatagctgaaagttaaacaatgtgcattaaaaaattgtacctcatgggtttctaatcatttaggccactgttagaaaaaaatgggttaaaatctttttttttttttttgcctctgcattccatttatagctttatttatttgggatgtctgagttgggaggagagcgcagagatagatcacttaaagcatgttttaggacagcagatcagaattagttggaaaacttctacaaaatgcatgaacgttcatatagtgaaatactcttgtttttggacagagtttcattcttgttgcccaggctggagtgcaatggcatgatttcggctcaccgcaacctctgcctcccaggttcaaatgattctccttcctcagcctctcgagtagctgggattacaggcatgtgccaccatgcctgactaatttttgtattttcagtagagacggggtttcagcttgttggtcaggctggtctcgaactctcgacctcaggtgatccacccgccttagccgaccaaagtgctgggattacaggcgtgagccaccgcgcctggcccatatagtgaaatactctttagcaatagaaagaaccatagatgcatgagaataattgccaagatgtatttttttttgtgggggggacggagtcttgctctgtcgcccaggctggaggttggtgatgtgatctcggctcactgcaagctctgcctcctgggttcacgccattctccccacctcagcctcctgagtagctgggactacaggcacccgcaaccatgcttggctaacttttttgtatttttaatagagacggggtttcactgtgttagccaggatgatcttgatctcctgacctcatgatccacccgcctcagcctcccaaagtgctgggattacaggtgtgagccaccgcgccaggccaaccaagatgtattaagtaataaaagcaagatacagaacagtgtgtttctagtatgccaccatttacataggggaaaaagtgtgagtgtatgtatgtgtaggatatttctaaaggacactctagaaactagtaactttggttgccttctgggagggtaactgggtaacagctggaggagaagggcgaggagatttttcactttgtattctgtggtacttttaaaaactcttaagtcctgcatataatgtttatttctaaaaagatcaaccctccccacaatgccacatgttggcttttccctttccacctggagcagttgcagatgtatagatgaggcgaaagctcctcaggtggttttaatgtctggtctcacggaacatctcagctcctcctagttcactacttgctgagaaagccgcaaaacattgcagaaaacattagtttttcccattttgccacagacaattttgtgatactggaggaattattgactttctctgatcttcacgtttctcacctgtcaagtcagtgttagttgggtaatctcaaccttccaatccttaagatttgctgacctccatgcctcgggccttggaagggagcagggagaaaatagactgagggacagctggtcagtcttctgactcttctcctggtcagctttcacaacagcaggaaacgtgacatcaggagaaaggatgatatatttatttaaaatatttatatattacatggtaccacatgcagtttttaaagttctttttttttttttttgagatggagtctggacccctcacccaggctggagtgcagtggcaccatctcagctcactgcaacctccgcctcccagcttcaagtgattctcctgcctcagtctcccgagtagctgggtttacaggcatgtgccaccatgcctggctaattttttgtatctttagtagagactgggtttcaccatgttggccaggctggccttggaactcctgaccttgtgatctgcccgcgttggcctcctaaagtgcgtgagccaccacacctggccttaaagttctttctatacattttttcttttattttttgagtcagagtttcattgtgtcacccaggctggagtgcagtggcacaatcatggctcactgcagtcttgacctcctgggctcaagtgatcctcctgcctcagccttccaggtagctgggaccatgggtgtgtaccgccatgcctaattatttttttctttttttttttttttgagacagaggcttgctctgtcgcccaggctggagtgcagtggcccgtcctcggctcactgcaagctccaactcctgggttcatgccattctcctgcctcagtttcccgaatagctgggactacaggcacccaccaccacgcccagctacttttttgtatttttaatagagagggggtttcaccgtgttagccaggatggtcttgatctcctgacctcgtgatccgcccgcctcggcctcccaaagtgctgggattataggcatgagccaccacacctggccgcctaactaattattattattattattttaattttcttgtagagataggtctggcttcattgcccaggctggtcttgaacacctggccttaggagatcctccgatcttgacttcccaaagtgctgggattacagatgtgagccactgtggccagcctataagttttgttttaaagttagattgaatgataattccctagaaaattttattttctaaacctaactagataaaaaatatattaataaaaactgggaaattgatcaatttgtcatactgaattattttttgaatttgccctcttcccaaatacattgaaatgatggaaagaaaattaaaactttcataataaagtattaaatgggtggagattttatatacataaaattatatctgttatatttttatgtatacaattatgtaattttcatcttatatttaaattctatttttttaaaaccaccgaattaggtaataatagaactccggtcttaaagtaagagtgtatgtacacacatgcacatgtacatatgtgtatataaaatttttgtcatgggagttttatatataattaagataaaaattatatattatggcacacatttttatacatatgtaatattctctaccatatgtatgtaaaatactcccatattaattatgtataacataaatatttgtgttatcctgaaacataaacatagataatcatgttttaggatgggaatactcaggagtataagggtacctgttctcccattagtcagtctgtgaattcaatatttatgtgttctcatccagaatttctctgggacctgacaagctgactgtgatgcttgtgtgtaagaggaaatgtgctagaatagctgggaaggtggtgaaagtagcagcaacaacaaagcacagtgaggtgaaacttgccctgctggatatgaaacctcataatactagagtaatttgaaaagtgtggcattggcacaagaaaagacagacaaaccaaattagtctagaattgtggacaagtaggaatatactttataatgaagatggctttgtttttctttctttttttttttttgagatggagtcttactctgttgccctggctggtgtgcaatggcgtgatctcggctcactgaacctctgcctcccaggctcaagcgattctcttgcctcagcctcccaagtagctgggattacaggcgcatgtcaccatgcccggctaatttttgtatttttagtagaaaagaagtttcaccatgttggccaggctggtctcgaactcctgacctcaagtgatctgcccgcctcagcctcccagagtgctgggattacaggaggagccactacttatgaccttctttttctttatttgctatttcagttccatagaagcatgcgaagagtaacataacaaatgtccatctacctaccatctgtgattacaaaacttagtattttatcatccttgcttcagaattatttaataaagacaatacttcctctgcacaaatgcttaccttaaaactactcttgaattattttcacgattgacttatcaactcccaaatttaaaaccatgtatttttgtctttatattcctcagacatttatagaaagttatttactgagcagttactatgtgccagatattatgctgtttttatatactgtttttactttatatagctaattatattatttgtcacatattaacctattttaaatataaaaagaaatgacgcattaatgttttcaaaccttggtaacttttattaagtaaatacttgagaggaagcttttactggtaattgtggttttatttatgtagctatagttataatttattagaagtacacttggtgttttagttcttattaattctatttttttcccatcctgttcaggtggtttcctagaaacatgattgtttattggcgttgatctcagtctggtgaggacttctttactgataatgtcaagttcaggttaccctcccaaccaaggagcattcagcacagaacaaagtcgttatcctcctcactctgtaaagtatacgtttcccagcacccgccaccagcaggtaaggaacaaatactatgcaaattgcacgtgttttttgtgtttttctttacttttcctatttaatacacatgttggtagaaaccaccaaatttacctttttttttaagtggcaagagctatttacaaagacgaggaaccaaaggttgggaattaattatttctgtcttcttactgtggctttatgccaatttcaggagttgaacttgtctttgcttttgatgacaggagttgatgataaatagaaaacttatcaattctctagaatttctagggtaagacctatatttatactcccaagttgtggttgagttttaagctggccagataacttggcatgtcttgagtgatggccaggataaagacctctgtcttcttgagagattgatggtacgaagatttgtatagtaggtaggaaggaaggaagggatggtagataggaaggaagactttatcataggaagagtttgtaagagattgatttaccttgtgaaaaataaagtatgaggtgaaataatcatctcagagtagaccaaggatatgggtgtaagaggtttaaagaaaaataggaaaggatgggataaaacggtcctctcagagactcagaaagcagatttgtcatcagaatgtactacggggtcctcctgaggactcctttgaagtgtagtcatgattacagagttagaatggacattcttacgttgttcctgtgtagggaggcatttagtcttttaccattacgtgtaatgttagttgcacgtttttgttgattctttttttggttgaagaggttgctttctgttcctagtttgagaatttctgtcacgactggatgttgaattttgcttgtgttgtccccctcctacaccagtgttattcgtctgattaccaattttccggattattgttgctgctgtttttttcataaaatcaggccgggcgcagtggctgacgcctgtaatcccagcactttgggaggctgaggcgggtggatcacttgaggtcaggagtttgagaccagcctggccaacatggtgaaaccccatctctactaaaaatatgaaaaaagtagccaggcacctgtaatcccagctacttgggaggctgaggttggagaatcgtttgaacccaggaggcagaggttgcagtgagccaaaatcgtgcaggtggactccagcctgggcaacaagagtgaaaccccgtcttaaaaaaaacaaaattaactttgcagtttagtttatatatatacacatatatctatattagaatgcactcagtatatgtgtacattgtaacaaattttgacaaagtcataaactcacagaaccatcaccaaaatgaagatgaacaacatttctaacactccagcacgttccttggcaccccatcctccttggcacccacccgtgtcagtcctcctcccccacttcctactaacctcagctcctaggaaaccactgatctgctatctatcatcaaacattgtatactttctgagcttcatgggaactcttttgtctgtgacctttggcttcccataatacttctgtgatctatccatgtctggcatgtctcagttcattcctttttattgttgagatgggtataacacaatttgtttatccagtcacctattccagtttttgattattataggtaaaattacttagaaaacatatatctatatatctgttgtatctagattattaaaagaagtattgcctcattttcttaacagtatcctttggggagcgtacattttttatttttatcaagcccgatgtacttttttttttgagacagagtcttgctctgttgcctaggctggagtgctatggtgccaactcagctcactgcaacctctgcctcccaggttcaagcaattctcctgcctcagcctcctgagtagctggaattacaggcatgtgccaccacgcccaggtaatttttgtatttttagtagagatggagtttcatcatgttggccaggctggcctcgaactcctgacctcaggtgatctgccctccttggccttccaaaatgctgggattacaggtgttagccactgtacccagccctgatgtattatttttactgttcattttttgtgctttttgtgtcaaacctaagacgtttttgcgaaattcaaggtcactaagattttcacttacgttttctttttttctatttttgttttgttttgcttttgggtttttttttttttttttgagatgaagtcttactctgttgcccaggctggagtgtagtggtgcaatctcggctcactgcaagctctgcctcccgggttcacaccattctcctgcctcagcctcctgagtagctgggactacaggcacccaccaccacgcccagctaattttttttgtatctttagtagagatgaggtttcaccctgttagccaggatggtctcaatctcctgacctcgtgatccacccaccttggcctcccaaagtgctgggatatcaggtgtgagccatcacgcctgaccaattttcacttatgttttcttctctaagttttataattataggtctttcatttaggtaaattacctattttgaattaaagttttatatgtggtgtagtaagcattgagtttcagtctttctgcattaagaatgatgttagcttggggagtgctctttactcctgttttcttaaggggtttgtgtaggattggtacttttctttgagatggagtcttgctttgtcatccaggctggagtgcagtggtgcgatctcggctcactgcaacctccatctcccgggttcaagcgattctactgcctcagcctcccgagtagctgggattacaggcatgcgccaccatgctcagctaattttgtatttttagtagagacggggtttctccatgttggtcaggctggtctcaaattcctgacctcaggtgatccatctgcctcagcctcccaaagtgctgggattacaggcgtgagccactgtgcccggccccagctaattttttgtatttttagtagggccaagttttcactatgttggccagactggtctcgaactcctggcctcaagcgatctgcctgcctaacatattctaatatttttcccagtgtctttttgtttcaatttttcttttttttaaagcatactgaagtttaaaatgtttttactgccatcaaatctttttcctatagtgtttattaacctttatgcctaattgccctttcttccctgatatcagataaataagtacccacacattttctttgagttttcatgcaatgaagagtaatttaaaagataataaatgtatctacaatttattttcaaatagttcagccaaaatgaagttttatacacatacacagacaaacacagaaagcaaatatgttaaaatgttaactactggtgaatccagatgaaggataaatgagtgtccattacactgttccttcaacttttaagtgaatttgaaatttttcaaaatagtaagttcgatggggaaaaattctttgctgtaagctagaaattagctaagcttctaggtgttttgtgacccaccttatcatgtaaaatatctttatcatacagtaatctgtggggtttataagaaatgttctgctgcattaaaaaaatgaaatttaaaactatagtgaataaaggtcatcttccatggctgaatacattaccacaaatgtagtttatagaatttcgttttttagcagaaaagtgtcttaaaaactcattcattaaaatgagtgtgttgtgttgtagtgtgacccatttccatgtcatagttgagaaactggatgttcagaagaattaagtgacctaggtagtacctcctgagttggaattaacctaggacccctgactctagtcctgctttttctcctctaaagtgtaaaccatgactactactactaactaatacttctctttccatctccctctccccattctctcccaactgcccacctccagaagtaaggatttaaaaagaactaacatttgttagatttttttttaaatgttaagcctaggtatatcatttatagaagaattaagtaagcttgaaagaaaaaattacctacagttttaccagttaaaagttattaacattttcatgttgagtcttccctatttgtgtgtgtattattttaattttaatttaatttaatttaatttaatttaattttataggttcttttttcttttttttttctttttgctgctgctccttgtggaacagggctaacccataggcagtgtgtccagagtcagcccttacgagtattttaatgtgctcactttgtacattctgtttaactttacttttgtttaaatatgtgcttagcttcttttcgtgccaataagtttacaactgtattgttagtggctacttagtattccacatatgaataaataaagttcactgattaaataaagttatttatttaatcagttgtcatacatttagcttgcctgtttgttcagaagtacggtgttgtgacgtgcattttttttttttttttttgagacagagtctcacttttgttgcccaggctggagtgcagtggcacgatcttggctcactgcaacctatatctcccagcgattctcctgcctcaggctcccgattagctgggactacaggcgcatgccaccaagttcagataatttttgtatttttagtggagatgaggtttcaccatgttggccaggctggtctcgaacttctgacctcaggtgatctgcacaccttggtcccccaaagtgctgggattataggcataagccactgcagctggcccatacattatttaggtttttttttgtatgcattcttacttatttccttaaggtagatttcttttagtataattaattacagaccaggttgatttttaaggttcagtgggtatttccagattgtcctgcaaaagactagggccagttcttaactcctggcaacaatgtataaaggtacccacttcttgaccgggcccagtggttcacacctataattccagcactttgggaggctggggcaggcagatcaccagaggtcaggagttcgagaccagcctagccagcatggtgaaaccccgtctctactaaaaatacaaaaattagctgggtgtggtggcaggcacctgtaatcccagctactcaggaggctgaggcaagagaatcatttgaacctgggaggcagaggttgcagtgagctgagattgcgccattgcactccagcctgggtgacaagagtgagactttgtctcaaaaaaaaaaaataaataaaaataaaggtacccactcctcctgtatccttgctgacaccacgtttattgtttaacaaaaagattgttaatttgatgaatgattgtttttaacttatacttattatttgttagtaaaatgtaacttttttatttgtttattggttatttttcctgttttgtaaattgttttttcatatatgttgcccatttttctgttggtttattttatattgagttattagagtgcatgttttgcaaatggtttccctatttaatcatttgcctttttaatttgttattactgttttgataagcagaagattgtgtttttgcatgtgtagtttttttttgtttttgtttttttttttttttttttttttgagacggagtcttcctctgtcacccaggttggagtgcagtggtgccatctctgctcaccgcaacctccgcctcccgggttcaagccattctcctgcctcagcctcccgagtagctgggattacaggctcgcaccatcacacctggctgatttttgtatttttagtagagatgggttttaccatgttggccagactggtcttgaactcctcacctcaagtgatctgcctgcctcggcctcccaaaatggtgggattacaggtgtgagccatcgtgcccagcagaagattgttttttattttatccatcaatttttcttttttaaaaactaatgtcttttatatcttttgcttttggctttcctgaacccaagataatgtgaatcttttttttttaacttgaggctttttgtgatttgctaataagcctcttgtaagtgtttgctattacttggctttttttaatgtaagatatgaggtaagaatctaattctttttcttcaggattggtatctggctgtttcaacccaagattgtaagcttcatgaaggcagatatcttgtctgttttgatccaccaccctattcctgttatacaagtaggcacttgaggatttggtttcttattaaatatttaatatttagaaaggaagtcagtggaaaatatttatttgtaatattaattctttgggcatgcatcagaatcaccagaggagcacttttgaagtctgctgaatcaaaatgtaatctcttttgctattatatatgtttctgtaacacaaacttactcatatgcatatagtgggagaatgatattaatgtatcatgaaagtcctggtggttcatcaaagatctttctttatgcgttaacatttctaagttctcaggagtacgcgtctcataatgaagaaaaaggcttcagaacacatgaagacttaaaaatatttgaacattctgcatttagttttcatttagtgcaagtagtaactggtttagtgaatttaagaactgttgtgcttttcacggtgttactgaagattcgagcattgaaaagacaacgtgaagacaaattttcttgtgtgttttttaacgatgataaaggagggagggggagaaaaagaggttgatacagatggttatatgccaaatctgactttttttttcttttttttgagatggactctcgctctgtcacccgtgctggagtgcaatagtgcaatctcagctcactgcaacctctccctcttgggttcaagccgttctcctgcctcagcctcccgagtaactgggactacaggtgcccgccaccacgcccagctaatttttgtattttttagtagagacagggtttcaccatgttggtcaggctggtctcgaactcctgaacttgtgatctgcccatcttggcatcccaaagtgctgggattacaggcatgagccaccatgcccagccactgatattttatttagatgaaacatagtggtttattttggaagccagtgacctcacggatttatatcttaagagaggaatcataaactgtagggcttaaagctgccaaagattgactgtatgccagatgcaaaggatactggagctttaactttattaagtctattagaattgttattgcttttattggtgctttccttacagaattgtacaggttttagggtatagccattatcttattttcccagaaggcctcttagattcagtgcatactattacagaatatgaggcttttcaccaatgtatattagctgaaatatctgtactaaggtgttttgaagcaactgtccagttatctcctgtatgcattcttggctcagaactattgacttttcacagttccttaatcattatttaatatattttagggttctgtaatcccgtgaactaccctcattgtaggtttctcatagtctaagtaaaattagtactctaaaatttatctgttttataatattgcttatgtctttacagcagactggaaattaatagggtgtgtgtggatgtgtgttggagggtagtggattttgggtgaaagggctttcattctgctacagctctgctgatttggaggcgcaatgggatgtttttggctaaggaaatgttacgtatgctgtagtgtgggctttatgaaagtaggcccagagatagtagcaactgaagttcctaggtcacttctctgactcgtgtacctcagttttggtttggaaagcctgaaaacttttgataggaacacttggccatgttatagttgttaagttgggtggacacacaggttttacctggaataatactatttcccagccagttgttcagaccatttgaagagccattgcaaggaaatggctgagaagttggtatcttcctttgtcatgattgcattatttacctataaattctctataatttcagtattgttacactagaggctgatcaacactaactcacctgactttgtatagcttttaggctcttcaaaatagtacatggtatatctaaactacaaaagtgaggtgagaatttgcatatatataaatatgaaagttactactaaacattagacacatagtacacatggttctgctgtggtttaaaactggctttttcatttaaggcaatctggactctattagtgagaaataaattgtttttcctggttttattctctaaaggatccaacatttggaggcaaacatgaagctccatcctctccaatttcgaggcaaccgtgtggagatgatcaaaatgcttcaccttcaaaactttcaaaggaagagttaatacagagtatggatcgtataaatcgagaaattgcaaaagtagaacagcagatccttaaactgaagaagaaacaagtaaaagtctttgcttataatattctaagaatgtgtgtttttctccctacagaagatatttttgagttttccatattatgaaactgtacataaaaggaatcatgccttatatattctggcttgctgttttttgctgctattgtggttttctttcattcattcattttccttgctgcactgtctgatcatatgattgtagagagtgaaatttgtccattctatttttgatttttttttctattccatacactggtgctggtttttggttcacatgtagagattttctagggcatgtgcccaggaatggcagtgcttggcccaagattatgcacagtgaactatttaatagatgacaccaaatttgctaagaagtaacaccattttacattcccactggcaacttacgtgggtactggtttgtgcacattcttgcctttacttgatatcattttttcatttggatatgaaatagtcttctctgtggtttggaaggaggctgagcttattttcatttgtttatgggttatttgggttccttatgtgcattgttcatgtcttttgtctatagtctcctattttgtcattgaaatttttaggattccctgaagtcccttgtcaggtatgtgtatagaagatttgcctagtttgtggcctgtcacttcacttttagcccagtatccactctaagtgtacactaagtgcatttttttttccacatttcgagtctcactctgtcacccaggctggagtgcagtggtgcgatcttggctcactgcaacctctgcctcccaggttcaagcgattctcctgcaacagcctcctgagtatctgggactataggtgctataagtgcttttaatgtattcataaagttgtacagctatcaccactctctaactctagaagatttttatcgtttcaaaaagaaactccatacttactagcagttactccccatttccccctttccccagcccctggcaaccactagactattctctgtctctatggactagcatgtgccaaatatcagaaaaaacagaatcatatgtgacctttggtgtttggcttcatttgtttagcatgttgtcctgattcatccatgtcgtatcttgtctcagcacctcattactttatatgcctgaatcccattgcgtgagtatactatgttttgtttatccattcattagttcatggatattggagttgtgttcattttttgactatgattaataatgtactgtgatgagattcatgtactcgtttttgtgaggacgtatttttacaattttctttatatgtctaggagtgggcatatggtaaatctatgtttaaattttttgaaaaacttcaaaactgttttccaaagtctctgtaccattttatattcttaccagcagtgtatggaggttccattttttcctacctccttgccaacatctgttattttccttttttttaaaaaaaatagctattcttgtagatgtgaagtggtatctagttgtagttttcatttgcatatccttaatgactaatgatgttgagcatcttttcatgtgctgattggccatttgtatatctttttagagaaatgttcatttagattgtttgctcatttaattgggttgtctttttgttactctaagaattctttatatattctggacattagttcttcatcagatgtatgacttaataggtattttctctcattctgtgggttcttttcactttcctgatagtatcctttgatgtacaaagttttgaattttgttgaagtccagtttgttttttccttttgtcactcttgcatttggtgttgtatctaagacccattgcctaattcacggtcacagatttatacctatgttttcttctacaaattttatagttttaccccttatatttgggtctttgatcctgatagtgtttttctggtgaacagaatttgtttaggttttatatgaaaacccactggggttattaaggtagttttactgtattatttgtagaagttttatagttttgcttctcatcttattcttaatccactggaaactacatattgtatagtcagtgttcatttatatttactcagatatttgtcttcttaagtgctcaccatttcttctcacaacttaagtctttcatctaggggaacactcttctactgaagaacatctcttagaatttcctttagtgaaggtctcttagttagcaaagtcagtatttgtttggtttttatgacttaaatattgtcttatatttgggctgtttattaaaagatatattaatttcatatgtgattattttttcttagtacattgtcttcttgcttccatttttaagacattagctcttggtctaagtccatattctttcatggataaagtgaattttctctctgcttattttcaatatattcttttcttcagggttccgttatttttatgatgatacatttaggtggttttttttttcccttttaaatctgtccaacttgagcttcctgaatatgaagggtggagtttttcatcactttggggaaattccaagccattatcttttttacaaaacctttctaacagtttattgttctacttatgaaatcctgttagttgtaatatcactcttgtcttccatgtctcttgtttgtttcttattttttacttctttgggcttccttctgagcaatttcttcagcctgtcttccagtttgcattttccttttcaattatatgtaatctgctgtcaaatctgtcttcaatttcaacaattatgtttttatttctggaatttctgtttggctccttctcaaatctgcctggtcattttttaaaatgtttttttgctttcattgagttgtattaaatttttattatatacccaacaattctaattaagtctttattggtttgattttgccgagtctcttttcttttttcttttgtctttattttctttacttgtacaatggtaataatctagtaataacaccaactaaatcacatgattgttttatgaattgagataatgaatatattgcataatatgtggtacatagttaatgtacatgcaatccattataataattagaaataatgaaatataatgtatgattattaggaaatgtaccagagccacaaattttattgagcgatataaaagacaactagaggaaacaaagaaatgtgccatagctggatggaaacagtaataataatgttgtgtgttcatcttggactaaatcatgtctcatacaatttcaataaaattccaattaaatttatttttaaaacatggcaaatacattgtaaatttaatgtaaaagaacaaacagggccaggctcagtggctcaacctgtaatcccagcactttgggaggctgaggcaggcatatcacaaggtcaggagatcgagaccatcctggctaacacggtgaaaccccatctttaccataatacaaaaaattagctggcgtggttgcaggtgcctgtagtcccagctactcaggagtctgaggcaggagaatggcgtgaacccagaaggaggagcttgtggtgagtggagatcacgccactgcactccagcttgggcgacagagcgagattccatctcaaaaataaaataaaataaaatataaaaagaaaaagaatttgtgtcttgtttcctcattaatgttggttgaaagcatgtttgcacttgtctttggcttgtgttttattaacattgattggcatattaaaagcccctctgagcttaccttctctaaaataatgtaagaaaaaaggcctgtgggaaggactatgaggcaggggggctggtgtgagcacatgcagggcaggaggaaagaggtaatgaccaggaccagggaaatccccaaatccagcaggtcagggagccaaatgaaagcctttcatcctgtattggccacctaaccccatcaacactccaagtgaacattctcttttagagatactcattgtcctgttttttctgtaatcttgtaaaggaatctgatttctcccattagcctttcacaggactaaaatttcacattagaatgctattctttagaaggcatcttcttagattaggctgcaaggagattgaggaagttactgtcagtcacttataccccacagggacattaattcaccagagctttggtgggggagtagaggagctcactacaagcaggtctgggtgctgcacagagtgtaaagggggcagaaggatccaggacacctaggcctggagacagcgccaatgctgggaggtaccgttattatccccattttacagaggaggaaacagacacaggcaggtaatgtgatcaagaccacgctgccccacagtacaggagccaggatctaaacccaggcagcctgccttgccatcagcgctctcacccataacctcgtgctgcctttaagcaggattgccctgtggccaggggcacagcttctgggttcaaattccagcttctctaccatttccagctgtgcgaccttgggcaagttagttgtctgtgctcagtgtcctctgcatagtgggtgtagcaatacctgcctcatggagtcccttgagttacagctgtaacatgcttataatgatgccatgcccatcatcaccatccactacatatgggccatcatgcctgaatcccagatggacacatatccttgaagggtctaaaatctaggatcctgaaatgcctggcagtgggatcctgaaatcctctggcagcattctaacatattttggctgcagaattgtaccctgtttcccagggctagaaggtgtgggatcagctgcttactcagttcagccccaaagtaggcaaagaaggttttgtcacaggcttgcctggggcccagcccctgtaacttccccttgtccctcccttgcatgctccctcacccatgttcacacatgcactccaggccttctgggccccaagggaaggagagagggtggggagtgggttcactggtccaccgaagcatgctgccttcagccctgctgcactggtgggtccagggaatgggcctggatctgaaggggtcttgccctccctttaactttaagccttgatttgcagtgatccaagagcttcatctcttcctgtgagcttgtctggatgtttatgctggatggcacaggccacttctggcagggtgcacaggtcagggcctggctggcagccatagcaggtgaggagactttggcagatgagaagaccttctgcttcagcttcaatgtattggtcttctcctggctctcagtacattcctcctgagccgtgatgggccccagttcaatgaagccttctgtggcagcagcatggtgtccaggggtatcatctggagcatgtgccagtgctaccccaaggtatgtggttgtggggctgaatggagccagaagggctggatcttgtacctctcttccatgtatcagccccatccttcaatcatcttgttattttcattttgactccctgttttattctgtcttctgagcacctatccattcatttatccattcatccatctattcatccatccattcatcccagcatcaatctatcaatccatgcatccatccatttatttgtctaaccacccacccatctatctgtctatcatttagcataaggattgatcagaagcctcctggttctggagccatagaccagacaccatggggagacatgatgaaaaacaacatatgatttgtgtgcttgaaacaagctaatgagtgcttaccacctgcctggcagtcctgcattcagggtgcagttctcccctcatcctgagctttttggtaccttctgtagtttcattttgtactagagaatgctgagcctcataaagtggggtcacacagctgcgtagtggagtttggattggagctcagatgtgtgtgatttcggcatcaccctctgccttgagtcctccactccagggtctcagagccactgagcattctggggttggtcagctctaaccttggtggcatgcattgagcaactctccatattttggagtcttaatgtattcctagccttagtgatggcaaggaccctgctttgggagacctgggttctagttccagtcctgtcccaaattttctgcgtgatctttgtctttctgacacaagaaccaattttcacagcctcatagggctattacagaggtcagagaagagaagagatatacgaatattagtagactgtagagtgttttgtttaggtgaagggctgtcaggtcctgacaaccctctggaatgaacatgtcagaagttgtaaaccgtcaatgcccagagaggtggagtgcctcttccaaggtcacatagctagtcagagacagacctaggggaaaaaaatgagagaaacacagattctcacttgggctctgtctctaactgcctgggagactgctcaagccccttccctctctaggcctcagtttccttgtttttacaatatgtgagacaggatgaggggatggacggggatgatatctgggggccctgctagaactcacctctagggcccaggcttgggaatccccagaacccccatattgtcctttacacctgggtggctgtgctcaagggctcagggagggtgaactcttgcggccctggactccctagcccttccccttctgtgggcccaccgtgggctgtcagtgtgttaggtgctggaatggtctgagctggtttgtagtcatttccaaggcagttttatggtaacctcacctctgtccgtgccatgtcctgagcagaagtcccggggagaagtcctgggggccagagccacccatgtcaccactagccatggtagtcctctttcccgtgaggaggctgcaccctgggagatggcattgggtggaatggagcatctctcctgacctccccgttaagcagaggtggctctgggactgtgggcagagatactggagtggcagtgggaagcgaagtggaggaggaaatattactgggtactaatgagtcacagttgatagactcatggcttcatgtgctttggaggcagtgtggtggggggcagatggcttatgttttggtgacctacaggcttacattcaaatagctgttacctcatgttccacgtctgtgaccttggcagggggagctcctcaaccccgaaccttgcacagctgagtgggagaaaccagaggagtcttgtgttgtcagggacctggcatcatgcctggcacagagcacttgcaaaatcttcattctcaagattggcatttgtagctctgggggatacacagagaggtctgtgtatgtatgggcaggtacatgtggataggtgtgggtcggtttgtgtgtgtgggagtgcatgtttcagggacacaggctatcaaagtcagcacaaggtgactccaataagggaagggaagaaagcgtatggtaaaccaggaagacactctagagatgaggcttcctgcaccccacatggtctgttggtgcctgtgccattgtagccttcagtgctcatgcttgtcctaccctcagggtcctcccctggatctcagtgcctggcctgtggaaagcttcagtaaatggggaaacataaatataagggaatataactagctaattagggtaattaagtgaggagtagccatttccaacatggattaacctgtccctgatttttaggggctggaggtctagtgagagagacaatttgcggcatgatggggaggaagtaggattcacagagaaggtgagcttggctttgtaggttaagtagaaattcaccaggcagagaagatgtaggaagatgctccaggcagaagagcaacaggatcaaagccatgtggtgaaagaacaaggcaagtgggtcagcaatgctactagacggggaggggaacaagtcaaggtggaaatggaggggcctcagctcctcagtgcctggggtgtcatgctaaggaatttggatcttaccctttaatcaaaaggacaagggagggacatgaccaggtttgcagtttgagaaaattgtcaggctgatatctggaaagaggaaggtctggggcagcgagaccaatgggaggcttctctgctcaggtgagagacagtggtcatctggattaggcagaatttgaacccaaggctgtaggaactgagaagacagttccagtttaccatatgaggagtacctgctgtggctggcagggcaccagcacttctacccagattatctcattaaaattctaaagtagacctggtcagctctggaagccacctgggcctcaggcatgagagaggaggaggaattcaggcaaatctagtgggtgggtgcagttggagatgctgagcctattagcaaagatgggacaggaaagtggggagcagggaaaggagtggcagggagagtgagtcctttccctgcctggctgcagcctttacccatgagcctcccattcctcattcctgccagatctgctggacccaggaccaggaccctggctggtgttgaaggttctgtctcctctgtgggcctccctccctctgcttcttccttctgaggactgctcaatgttctggctaaagaggaatctgcatactctcctgctgataaatcttcaaggatgcctctgattctcagcaaagcctgagcttcttagttttatgttctgggggtctccattgtttgatatcccctccccagcttcaactctgcctgttcctccgcatcaaagtacctgtattttaatatgctatctcctctccttttcctccaagattttcataattgtggttgtgatgatgatgatgatggtgaagatggtgatgatgaaggtggtgataatgatagtgatagttatgctgaggaggatgatgatgttgaggatgatggtgaggatagtgatggtgataatgttggtgatggtgaggaaggtgatggtgaaggtggtgataatgatagtgatagttatgctgaggaggaggatgatggtgagaatggtgaaggtgagcatggtgatggtgatgataaggatggtgatgaggtgataatgatggtgatggtcaggatggtgatggtgaaaatggtggtggtgataatgaagatgatggtgatggtgaggatggtgatggtgaaggtggtgatgatactgataattatggtgaggatgctgctgctgatgctggtgagaatggtgagggtgagactgatgatgataatgaggatggtgatggtgagtatggggatggtgatggtgcaccccttgatttggcaattcgacatctaagaattgttcatttcttccaggatttttttttttgagtcaagacttccctatgttgcccaggctggccacgaactactggccacgagtgatcctcccactttggcctcctgagtagctgtgattacagacatgaaccatggtgcctggctttaccctaggaatttatcctgaggaagtaatcagacaagtgtgccaagcagtacttaaagaagggtatttattgtttcattgatgatagtaagtaagatgtgggaaaactgtgaatgtccagcaataagagattggctaaataattgtgctacagctaggcaaggggctggcttatggccattcagaacacagaccctcctgattgagtcaaatctcctgtcactgctctcacacaccacacacctcccttcttttcagcaaattacaattgtaattttacatttctttgtgaacctctttgatgactttctgtatccctcattagatgctaagctccatggaggcaaggagtatactatgttcattgttgtgtcctccatgccaagttaagttcctggaacacagtacactctcaataatttgttgttaaatgaatgactgaatctgtatttcttagtatggaaagatgtttgaaatacgcaattaagagaaggagcagatcataaaacagcatgcatactgtagtacacactgctaattccctcctttcttgatcttctttgggtgaccacatatgcactctcagtcaataaattatgattgatccaaagtcaatcatgacaatgctattctctactgctagagatggtcatgagatcaggttctggccaatctaaacacagatttccagacctaaagagaaatcctctgggggtcacctctgaagttcctgcttttctaataagaatacagaagtgactgcttttgctggccttgtaaactcatgtagtggttggagctgcagtagccgtcttacagccatgagctaaattccaataaactcacaaagatgctgggtctaacattgttgaaccagtgaaccatagccaggaaccatagataccctaactatgtaagaaaaatgaacctgtctttgtttaagtgactgaactttcagattaatgcactcccaacagatacagagcatgatcccatatatacctgtatgtgcaaatataaatagaaaaataaagtgattatctctgtgtggtaggattctccttctttttttattttataaagttttcccaaagggcatgtaaataataatcagacaaatatttctgtacattcagaaaataaacaatggtactaattttatttttagaaaataaactaaatattgaggccccagaaggtagttcactaccatatgataagttaattagccacgaccgagatgaacacttgtgggtatcctggaggacaggttctgcagcagtgagaggtcccctccagaacagtatgtggttccaaactcctgagggaggcggggcagaccccaaggaagtagatgagaacctgagtgaggctctgtggggagagaggatgttcctcagccctcacgaggacatgtcagtttcacttgagattaggccccggccttggctgggcagcctgccaggcaggttctcagcagcatgggatgataacaggaggaggggaagcctggcaagctggggcagctctggggttttcaggtggggctgtctcgggcagcaactgtgttggctgtaaacacagatttccaggaagcagagtgttgcaatctctcccaccacaaacctggaccatcagggatgtttccatagcagcatccatgccagtgagaaatctggacatgatctgtgatccccattcccacttttccttttctcttagaatgggacagagcagcctggaggagctagtgtcctgtagtgactccagtttgctgctctcttccttatcttcttcctcctgccctctgtctcctctgcatccttcaccttctacatcaggaagctcaagtcaccgggctgagcctgggcttctcatctaaatcacggagtgccagtcaatgtctcccttcctcttcccagggagcaacttcaatcttccctgcctgccatggggagctagaccctgctccttattccctgtgggaccatccacagcctgtatcctcacccctgtaatgggactgcagtcctccctgcccacctgacagtgctaattccaggccaggggagctcctgggaaaatcaccagtgtgggtgacacggtgggtgtttgtgtgtgtggaggggtggggctgccacctggccatttacagaccccatccttcctctctccctgtgcttgtcgcatgtcaggaatccctctcctttgtgccacgaaacataaggcattttcagatccatcatctcattgagccttgcatctccttggtgaagttggatttatcgtcaccattttactgatgagtaaaatgaggctcagaaacgggaaagtcgttgccagagttccgctgtggacttacagcggagctgggattaggatgcgggttctggattcctggcggggtcctggcccatctgcagctaaggcctgtctttctgctcccatgaggtcccttttccattcctttcctccccatgacagccactgtcaccaccacccagggtctgtgctcactgtcacatcacccctcgctgacccctgcgtctgggctggaacccgccacgctccaagtggacacccaggccccatggtgatacccaggttccaggtgggcaccgggccccagatgaacaccaggctccgggtggataccagaacctgggtggacacccagctctgaggtggatatgggctccaggtggacatcaagcctcgggtagatatctagtcccccggtggacataaggcctcagttcgacaccagaccctgggtggatacctaggtctcgggtggatgcatctccagctgaacatcaggctccaggtggacacccaggccctaggtgaacactaggtcttaggtggacattaggccccaagtggacacccaggtcccaggtggacacccagccttaacatggacatcgggccctaggtagacagcaggttcaaggtgcatatgaggctcccgataaacaccggtccccagggagacccttgtccccaggtgaacagcagcacccaggaagacatccgcctccacctgcacatcattccccaggtgtatacctaggccctatgggagcaccaggccccaagtgagtacatagatccctggtggccattaggcaccaggttgacacccagggcttaagtggacatgaggcgccagatgaatgctagtccccaggtggataaataggccccaggcatacatcaggtgtgaggtctgtactcagtcttcaggtggacactaggccccatgcagacaccagaccccaggtggataccaggccctatgcagacaccagtctgcaggtggacagcaggccccaagaagacattatgccctgggttgacacctaggcttcagggcaacactaggccacaagtggtcacctatgccccaggtggacatcaagccttagtggaattcccagtcgccaactgaacatcaggccacagggggatgcccaggctctaggtgaacaccaggtctcgcgtggacattaggccccaggtggacagcaagccccaagtgaatacctaggttcctggtgaacatcaggacccaggtggcacccaggccctacactcaggccaaaagcagaaatcagaacatatgtggacactcggggcccaggtggctatcaggccccaggtttatatcactttcctggtagacatcagtacccaggtagatactggacttcaggtatacatcaggttcctaggtggacacccaggccccaggtggacaccagcctacaagtggacatcagaccataggaggacacctaggccccagatagatatcagactccagaggaacaccaaggcctcaggtggacatcaggtcccaggttaattccagaccccagatggaactcaggccccacctggacacaagtccctaggtagatacacaggccctgtaggccctggggaacatcaggccttaggtgaagttctaggctacaggtggacatcttgctccagttggacatctggtcccaagtggacatcagtctccaggtggacacaaagtcccaagttggacatcagccaccaggaggactttagtcctctggtgaacaccagctcccaggttgacatcaggctacaagttgacacctagggcccagatggacatgtggccccatatgaacactagtccccagtcagctggggcctgggtccacctggagcctgaggcttagctagagactggatatccacctgaggccaaggtatctacccagggactggtgtcaaagtggggcctgatatctacctggggactaggtatccacctggggcttgatgtccacttccagccagatgaccttctggagtctgatgtccaccacaggccggggtgtccatctggggcctggtgttgatttggattccagtgtctacctggaacctggagccatgttgtccacttggagcctggagttttcacctggggcctggtagacatctggccccagtaaacatcagcctggggcctggttgtccacttagagcctggagttttcacctagggcctgaagatcacctgggacccgggtgtccacctgggacatcaggctccaggtgtacacccaggctccaggggagaacaggccccaagaaaactccagaccatattaaacatcaagtctcaggtggatgcccaggccccatgtgtacaccaggccccaggtagagagtggacgccagctgaacatccgccccaaggttgacacccatactacaggtggatatgaggccccaggtgaatacctatgcttcagatgtgcatcggtccccaggtgaacataaggccacagatagacatcaggcctcaggtgcacatctggctccaggtaaacatcaggccttaggtggatacccagtccccaggtggacatcatagaccaggttgacacaaaaaaatcccagtgggtatcatgtcccagtggacgtccaggctccaggtaaacaccccagccccactgtaaccataaccactgtaacgagaaatggtaggtctaagtaccaaccatcatgctccttgctcacaaaaggatgcttagatattttattcaaaatacaacgccattcatcactctgagcagcgatgtatagaaaggaaaagaaaaataaaccagccctcaaggaatccatccaaaatgaggtagatactataagggacagaaatccccaaatgaaatgttatagttgacatagaatagtctttaaaacccattaattttctcgcacatttgatacaaagcattatttccagagactgaacctagaaagaattgcttaagactaggagtcttgttctggcctggatcccacactgttgaacatctatacttagtacaccacattatacatagcactgacatgactcgtgtgcatttaattttctaatacttgttcatctctggcatactttatatatatatatatatatatataacatatgtaacatacatgcatacaagtacacacacacacacaaaaagtatataagggtaggatagtaaaattgtgcagtaacgtttcttgtgaaagtggtggaaagtggattgccttgtcgacatgctggaatgtgcttccattggcagaagtaaggctttcaaaactagtcgttttcatttttctctagcaactgggaatattaataatcgaagatgtgttggtataaaaataatcataataatcacaatgaagtggtgttaataattatatcacaagatataatagacattatagatattataagatgtcaaaaaaaagaagatgccataaaatctttgagatgatttatacgttaaatgcggccttctgtgccgccctggggcgccactctcgctgggttcttggcggtgctcaccctactccacctgctcagcccaggctcctgcgtccccagagtcaggccatgggagcgaggaccttgctgcgaccctagacaaggacaatgaggagggggtgcacgtggagtccccgcggataggctgtacgccgggcaggagcctttgcgggggtgcacagcctcctctggaagccctggttgctgccgggtgcctgctgcgccctgcgagctccgcggttgtggagccaggcctgcactgcctgctctcggccccgcctgcggaccctctgccctttgtcttgcccgtggggcccggggcctcagctggcccggggttcctgaagttagctgacgatgggctggcctctgggactgggtcgtgggccttgtgcactggccgccacgtcaccagcgccaggcctccccgcggtgctgctggagatgcgggatgcccgggctctggctctgctgggtcccctggcgctgcgaaccccgtcaccttccatcgcggccaccatgctgcccgctggtcagccctggtctgcagacttcctgggacccctccggcaccaaggaggcatcactcacagccgcttgcgacaccggggccgcctgaacctccgccagggctgcgccgcgcaagtggctccagccagccagccctggcccatgagccggactttcggctccccgagatgattgccctcggcagggatacacggctatggaggaggcagcggataccttccaaagtttgtggacactcttctgccacaccaaaagtttcaccatcagctgcgatgccgactcgggcgcagagaccactccgggatgtggaccaggcagtgcctttgctgggcatccgcagtgctgaccaccccaagtgcagatccccacttcgtgttcctcctactccacattccacatccaaagttctctcaccatttctaagcaggagaaatcaaaagaagctgaaatcagaaagaaagagagagagagagagagagagagagagagagagagagagagagaaagctatgcgcaaaaaaaaaaaaaaaaaaaaaaaaaaaaagagcaaaaccttttggaaagcataaaacgccccaaagccaaaaactaattcttatctcttttaaaccttctgcacttctccaatgatgaatgtttttttttaaccactggcaattcataattattaacttctctggcattaatgaatagaaattgaatcacatatggaagtataatttgtattatacgaagcttttcatattttaaaaaatatttgtccagtttttctccatggattaacaatgggagattttcaacattgctgtgttaatgtctcctgagataattagatgtgaataatcttttataaacagaatttcctgggtggaatttctcatcttcaggagctccgtaaataaccatgtcccaagagaactgtgaatttgggaactgcaagaactgagtccaaacttgtccagcctggaagcttttgggtgatcgctcttgcaggtgacttcactgccttctgttgaagggccagtgagagcctgggggtttcaacctgcaagagccttaccattttagggttagcattaacaatgaggaaaaggcatactttttttgatattctccgtatgtaacaaaatagttaccaaaacaaagcaaagtgtgagtggtgactattgagaggaccctttctatctttgctggattcccagagatttctgggtttcttttcgagtcaatagtatctccatgttaattgtgagctcttaaaacccacaatatgagttgcagccagtgactagagatgcagccagtgactagtgttgcagcttgttaaactgatcactggtggtagagccttttcgttctgctcatttcttaaaaggtcagcttggtcagagattagtgctaccctgccagaaataagcagttaggaatcaagtaaaggagtcagctaaaagcgtaattactaagtagtgaggtcatggctagatggttgttgatctcattttctctctgctgctgatttcaaggctttataccacgttttgatgtaacatagaatgtatactatgaaggacaaatagtctgttagcttcttggagctatactccgttactggagcaggggacaacaatttgaaggacattactacttagacagtttaatctgcctttggctagaataaacttcaagttccaagggctgggttcagttgttatgcaaatttagattgttgcggtaaaatttccgaaaaaaaaggataggactctttagatgaaataagaatttaactgtatttgaactctgttgaaggccagacaagtttaggcaaaatcccacgactgaatactctgtgatgagtccctttaaattccaacgtataatctatgttggtaaatatgatacgtgcactggaaaaggatgtgtattcagtagttgttgagtgtcgcgttctgtatatgtcagtttatgtcaaatttgttcattgtgttcatcaaatctccctttctcttatggatttttttctgttggtcccatcggtaattgaaaggtatgttaaaatctatattgtagattagtccatttttcttttagttatatcagtttctgtagtaaataatttgaaggggtattttatatttatacatatttaaaattggcatacttttctagtgactgacattgtaaaatcttttttatcttagcaatatttctttgcttaaatctaaactgtcaataataacatagcaacatgagctttgtgctgattagtgtttgcaggcatgttttccattgttttacttccaaatgtctggagtcttgtattcagataaattaattaaaacataaaaaataaatataatataaaacattaaaaagtaaatattctaaaaatccagccagagatgtttcacttctaattgaagtgtttaggaccacggctctcacactgtgtgctaaggtgccctgagatgctgtgtttaactgacaggggcaccagcggatagcgtgtgagtctgtgtatgtgtgtgtgtatattcgagatgggggtctcactctgtcccccagactggagtggagtgtgaggtctaggctcactgcagcctctgcctccctgagtagctgggacaacaggcatgcaccaccatgcctggctaagttttgtaattttagtagagacggggttttgccatgttgcccaggctgtatattttcgagggaaacgaagcaacatttgctggagaccttaagaactactagctgaggcagtttatagtttcaaaagtagttagttagaagtgcatttctttacctttaaggtgggtgttgttaattaccgcgaagaaagcaagtattgtgctaaagtcagtgtggaataggaataaggtccagtggttgagatccagtctgattttaagatttgaaaagttgtgctgtgtgcccaacaggcacacacatcccattagtaagtaaattgtgctttttaaagaaagaaacaaaaaaactgtttctacttccattgcgtgttatttattatatgtacttgcaaatccatcaccaaaataaaaataatgaacatatccagcactcataaaagtttccccttgcccttttataatcccaaactttctgtatcttcctaccttaccactctccctggcaataaccaatctgtcactataaaatagtttgccttgtctagacatttatataaatgaagtgtagtacggacccttttttggaggtgtctggcatctttcacacagcataattattttgagattcagctatattgcaggcatcaataggtcattaattttattactgagtagtattctattgtgcagatcggtcacaacttatatatccatttgcctgttgatgggtttcagcattgcttccggttttggacttatacaaatacatttgcaatgaacattcatgtacataagttcttataactttgagtaaatattaggagtgtaatagctaataggtttaggtttagttttaagagactgtcaaaatgtttgccaaaatggttgtaccattttatatttttatcagcagtatataagaattccacactcttgccaacactttgtatgggccttcttttaaaattttagacattttcacgtgtgtacaatagtattttattgtggttccataatgcctaataatatgtagtatctctttatatacttacatgccatctgtatatatttggtaaagtgtatgttcacatttttttttgcttctcccttttttgtttttttctttgcttattttctcattattaaattttaatagtttctttatatactctggattcaaatcccttattagatatgagatttgccagtattttcccgttgagttttcttttttgttctcataacattatctttcaaatagcagatgctcttaattttgatggggtccaatttattaattgttcttgtgcatttggtttttggggcttcatctaagactttttgattaattgaatattacaaagattttttttctgtattttcatctaaaacttcatagcttttaatactttattttatatttaagtcaatgatcctataagtgacagagctttaacccaagtcgctgtcatgcatagctggacccgggggcttatataaaatcttcaagaaatgttctccttctttctcttgacacttttccttttgttttagcctcattttttccttctgaagatgactctcttctctctctgtagcaagagatagtgctacaaataacccactttactttttcctcacagaccacagtggtagaaaaagcaagagtccttcctgatgattccaaaaaaaaaagtactgaaacagttgctatgatccaagggtagagtcttttgccagagctgggcatcatgatcacctctagggctggggctggtaggttgggtcaggcccagttggtgctcattgaaatggtccccaaagaaaaggggggctctcaagaggagaggtgctgaacactccaccaaaaaatagccactgcgtacatacctacaattccttgccattttataagcaactggttgggtgaacaatgactggaaattcagttgtcattaactttcctttataatgtcagtagaatgagccatatatttcacatgttgtgggttatgtccatgatagtcatttctgtatattaggtatcaatttggagtatcatctgaagaaatatactattttgtgatgttatccttaaattaatatctttaggataaagaattataggatgaaagaaaagtctaggctagaaataaaagaatagagaaaatgggagcatggatatactgcagaaaatggccaaacaggaaaagtacttgtgagaggtattgaagtacataattgatgtcacatagacctccaggaaattacaactactggcataagaacaaactatctgaatagtctttgctaatactgagtcttttctgcttgcaaaagaagtaagaatggtaaggaattgggatattgttcagataggcctcaatgcatttattcatttacctgttgatggggtttgggggtattaatgaaggatgttaataaataataatgggcatgttaggtaatcataattgatttgtccatttggtctgaagaacattttgcctaccttcttttttgtcgagggattcatttttaatgtcatgttggattctatggcttactaaatgtgtcattgcctatttatggattctgaagaattttataaaatgtatttgccaaactttttgaaagcttagaacttctccaaggaagaagttctttagtgctttagtgctgccctgacaaatatggtagccacagccatgtgaatattgagcatttgaaatgtggctaggctggaccgagatgtgctgtcagggtaaaacacacaccagattttgaagacttagtaggaaataaaattaaacatatctaattaataacttttatattggttagacattgaaataatattttgtatgtattttacatataaaatacattcatgtgtatgcataattaatatcttcatatgaaatacttatcaattacaattggaagaatgatgactttgcagtggagaaatctggcacaaacttgatcatgtgcctcctgctgtgatgtcctaggaagaccacagcattatttctgtggttttcttgtgaaagatacatgacctaagtctggatgtggaaacacatcagatggaaaaaggtgaacacatccttcttaaatgcttatgctctttaaaactcttaaggttatgaaaaatagggcaaaacagaggaactgtttgaagttgaaggagcttaagatacatgacaattaatgcaatgggaaatcctggattggatcccggattacaaagttaaaaaaaaatgtatttagggcacacctgagaaaatttggatgagattatagcatctgttgattggaccgtagtgttgggtgaatgctgatatcctgatgtggatgattatattctggttatgagaacttttcccacattcctcatcatttgcccagtgggttcatggagaatgtggcgatggtagcaggagaagatgctacatgtttccaataacatgaacttccctgcagcagtgctgcctactgcccagatgagtgccctgactgccaacaatgagcaatgctgagaccctggaaagaggagctaccttgcctagaccagacagatttctggtaatgttgtaataatattttttcccttccttcatggaagtggtaaagaattgccctcactggaatagatgcatatcggaatatggactccacttcatatgcttctcatagcatcaaattatttacatttgctgagttcttattctctgctatcatacaattactattgatgatggggcttattttacaaaaaaagaagtgatgccatgggcttcagcccatatttattggtcttgtgacatcccacatcacccagagaaacatgacctcacaagaatcagttacttcaccaactgtgagaccctgaggggctgggtttctatcctacaagatgtgttagatgccctgacccaagagccctcctacccagaatgcatggttccatgtagcaaggatcattgtgatggtggtgatgatgatggtgaggatggtgatggtgaaagtggatgtggtgataatgaagtgatagttatgttgaggatgatgaaggtgatgatgatggtgagaatggtaaaggtgaacatggtgatggtgagaatggtgatggtggtgattgtgatggtgatgataaggatggtgatggtgaaggttgtgatgataatagtgatatttatggtgaggataatggtgatgatgaggatgatgatggtgagaatggtgatagtgatgatgatagtgatggtaatggtgataatgatgatgattatgagggtggggagggtgacaataagtattatggtgaggatggtgatggtgaaggtggtgataacgatagtgatagttacggtgaagatgctggtgttgatgatggtgagaatggcgagggtaagaatggtgatggcgacgatgatagtgtttgtgattgtaaggatggtgatggcgatcatggtgatgatgatgatagtgctgactgggctatgaggtaatggaggcagaaaaatggcagtttctaggaagtatagagccagctgggaactgcaaggcaaccttagtgggggtggaagatgtcgggcccctgcctcatttctagacatctggggaaagctcacccctcacagtagttccaggaactcctccatccagcatttccttctcgcaatcagcatggagcttttggggtgcagagaagtgtcttctattcactgcactctgtgggaagggaaaagggggagtgctatttatgaacccagtataatacagtaggatctcatctaatatattttgggaggattttcagctgaagagagcaagcctcagagaactcaggtaactttatcttcaatagcatccagttgtgatttattgagcagttactatgtgccaggcaacatgttgggtggttccttatatgttatctcatgaaatcctacagcaacacaaggagacaggcataactaccccattttaaaaattgtggcaaaataaactaaaatttactgtctaactatgtttaagtttacatttcagtggcattaaatacattcgcaatgttgtgcaaccaatttccagaatgcttttcatcttgtaaaactacaattctgtaactcatttagaaagaactccccaatcaccatcctccccaggacctggtagccaccattctcctgtctgtctctatggatttgactactctaggtgccttggaaaagtggaataatacagcatttgtctttttggtctggcttattttgctcagcctaatgtcctcaaggttcattcttgatgcagcaggtgtcagactctccttccttttcaaggctgaacactattccactgtatgcatagacagcattttgttgatccatccatccatccatggacacttgggttgcttccaccttttggttattgtggatgatgctgctctgaacatggttgtgcaagtatctcttccaggctagccccattatacagaagagcatagagagattctgggaggagggatgaccttcccggggcctttggtgaggtcctggtggaggatctcctagatcacaaaggcagagctcctctcctcaccccactgcctttcttaggacctgcctcctgctccaccacacagtgcccactccctggtactagacttgctaaggcctcttgatccctgaaagttcagggacaggaactggtgggcacaactacagtcactcacttctctgtcccctactgcagattctgtgccaaacaatacatgacaatgacctgctttccactctttcaccagatgtggatgaggcacctactgcatgccaggcatgtgtgggcactggatggagacccctgggaaatgagaagatgtgagctcctcaaggccaggggcatccctttcacttgctgctaccctgtgagggatggaggggaaccctgaggcattggagaagtgcatgagtgacctagctcagatgatgatatcatagtaaccctgtttattatcacctaccatgtgccaggcattgtgcgaagtacttcgcacacattaccggctgtaaagctcagagacaactgtaggagtgaatctgttatacctcccactttacaggggaggaaactgatgcccagagaggtaaaccagtcttccccaggccttgcagctagtctctgggatgtggatccaggtggtctgactcagagatcccctcatcctcttggtttttgcccctgtagccctctggcctgtccccagggccctgtacccttggccaccccgaagatgacctggacatgggcttcagcaaaggcagcaaccccagcacatctccatttgatagggaggaacctcaggtccaccacaggagccctgggctgcaggtggtgtaggtgctggctgaaccacaatgcacccatgttggaggatgcaccctaggatgggcagcagcaggaggtctccctgcccaacaaccggtagtggtacctgagaacaaaggaggagaaggaggctttgggcacaggtgtggagaagcccaaggaggaagaagaagacttggactatgggctgctggatggcctcaaggaccccctcccagaaaaggaactttgagacttatacccagggctgagatgaaagtgctccctattttctatcctggaactgctgcaaacctcagtgtgacatcacagggcctcatttccctatttgtaaaatgggattttatgggggttccaatgagacactggactgagagcattttgagaactgtaaaaaatgtacagtgagggaataattattatcaatggaccattgctcttccaatagttagtattctttagcaaatatttgaaggtaaaatatgatttgttgaggaggtttgcagcagctgaggccctcaagagtcttttctgtctccgttcaaagctggcctctgacagggaccttcttggtgctacccctgggcccctcatcctttgtgcaggcttctcggggttcttattttcttgcatcttgtggttccctagtggatggcatgctccatcttcactcagagctaactgcatctcctccaggcccatgtcccttgtgcagcacccactgctccctcaccaggattcaaaaccttctgtgactgacttctgctgacctcccaactttatcctccctcattctttctgctcctccagttccatgcctgtgcccctcaatcctgtggctcacactctcacccaagctgttctccatcaggatttccttggctcccctttctgctaggcaaatttgtgttcatccttccaagccttgcacagatgtcctcctctgaaagctctccctgaggtcacacagtccaggaacaaggtagtccttgctcctctgctgcctctgggttttgtgcctttatcactttggtgtgactgcctaactcctgctgaagggaggcattttggctttactcacctcagtatctcctgggtccagctgggtgtctggcctggcccagaattggtgctcatcgagggtgtaaagaactcacaaggacccaagaatgttttgcaaataataccaccctcccacacttctccaatgtttactttctaagctcctttactctttgacattcaaatttctaaatggcctgtatgtatttacaaagcctgggaaaatgccttcagagaacaaacacaccccaccggcagaatgtatttgcattgactaggattatggatgaaattcagctttccggcaaatgaatcatttggcattggctgagtatctgctctgtgccagatactaagctgtgatctctagaaagagacatgaactactgacacagtccctgaccccgaagagctcagaatccagtgagcttgatttcttgtaagttagagacagagttcagagcagaagctcaggcaggagaagagaagtaaaatggacacaccagaggcagtgacagccacacaggtgtctggggacactgagtgcagtaacaaatagcttaggctgccttggcagcccacgaaggtatcacggtttcctattgcagcatctcagtgttgcttttgttatgctgatctctgcaaagcccctctgtgccccagcccaggatggtggcagccatgctgtggataaaagggcagtgacgaggaccacaggctcagagcttgcaccctgggccgcctgggaatgggagcccttcacatgttctctgcctctgtgttcaggttgggggtcctggccaaggaagggagatgacccccatgctaggtcaaaaggacacactcccgggaacagactgtctcttctttctgggtaatttctgcctctgcagtgaatggtgaaaccagacacatcctctctgttggtatgacacaaagacaggcgttcctgctcgtgggctgaatcttcagatgaggggaggtgtagcacactcctgtgctctgctgactaaggcaggggcacatgtcaccccatcagaatgagtgccagaccaatggctacaataaaatcatttccaatattcaaaggagtcaccttcattcatctacaaatacttttccttttcttttcttttcttttctttttttttttttttgagatggagtcttgctctgttgcctaggctggagtgcagtggcctgatcttgtctcaccacaatctctgcctcccgggttcaagcgattctcctgcctcagcctcccaagtagctgggactacaggcgcccaccaccacatctggctaatttttgtatttttcatagagacaaggtttcactatattagccaggctggtcttgagctcctgaccttgtgatccgcctgccttggcctcctaaagtgctgggattacaggtgtgagccaccgcgcctggcccaagttttttctataaaaccacctattgcactcaggatagggtaaatgatgcatcatgcctgcgagtgcccaccatcatgctgtgcagtgcctgtgtggtgctgaatctcaggagcagctcccatcctgtgaacaactacagggacattagacataagcaaagacctctggtggccacgccagccagcaagcagatgctaaccctgtcctgggggtctgcagggaggtcgggccagtggagaggtggcgagacccatgtgtggtcccccaaatcccgcccatgctatgcaatgggggcgaccacacacccgatctgcctgggagggtcctggtgtgcccactgcctcgctgagttatgaggggtgctgcctctcacatctcaccggtatcgcatttgaaggacaaattatgtcttcccttccccaccctgtggacctctgtttcctcatgtgcaagtgggggatgatatgcttacatggttatgcagtgggggtatcgatgggatccttctgtgaataccctgcatccagcgaccacctggagcacacctgcagttcgcaagctgggcttcctgctgcagtgaggggagcaagcactgcctggagccagggagtttctctgaaggaggtgttggaaaggacttgttccagaatttgggcttgtattgggagcttgggggagggttgaaagaagcctttgctccagattggatgctgtcagaggcagggtggattctatcacctggcatcttccccaatcttacctagaaggaaggaagaagacaagaccgaagctaatgctgcaattgacaaagaggtagtggtcatgacatagacacaggggaggggctgtgaggtcatttttgtccatgttttgcatgagctgagccatgatagctaccaagtgaccttgctttgtcttgacccatcatggtcacagagcgaccctgtctgatgctgacaacctgtgcagttcaacaagagaacaccaacgccttgccagcagtggctgccgtcctcctgaggcctcgctgctcctcctctggggccgactgctgaccttgggaggtgtggagtgggaggggaatatgccatgggttttttttgcagagcaagggcaggagactctgatgtcttcagctctggccatcctgagtgctgtgatctgcttcccctgcttcctacaccacccgcaatcccaccacgctgctgcagtcactgccaactcatagtgccttctaagggctccagtgtctctgggacaccccctctcccctgggagggaagcaaggtgctcatgaaggtcccaggtggaggtgctgaaagagtgtagaggtgccttcttgagtgtcaaagtctgggattccagctttcagcctcaggctccaggtgtgtgtgccgaagtggaatattctgctctcattcgctctcccgcctggtcagaggaacttggggagtttcctctctaggggagggaaaggtcctggagaggtggccttgccctgaactggaaaggggtgggcatgggaaagcaagggcctgggctctgcctactgcttgctgacagcctgggcacagcactgccttccctgggcttctgcctcttttctctgtatgattaggtggaggtggatgggattctgcttctactcccagtccttgggcaccatgtcaggtactcacacacttatgaccccatctggtccttggaacagcactgggggatggatctgtcaacctcacgttgcaaatgtttgttctaaatcccacactctgaagtcagaaagacctgggtttgccctcagccactgacggttgcttgctatgtgaccttggacaagttgctgcccttctctgagcctcaacacccacatttacacagaggaagaataatacctccctcttgggctgctgtgaagcagagctaatgggtacattgcctcaggcacattgcaggtgctcaaagtgttggtctttccttccctttctaggtctccacttcctcatctacgcagtagggagcaactctgtcctgattataaataagacaataggtgaatgcactcagcaagcctgggggcagggatgcgtagagaagcttcttgcaaaggtgaagaatgtgtgctctgagccccgtgctgagaggcaggcaagaggacagcaagcccagcgactgaggcctacaaaatgccccctgcagagagggaggaggagcagtgttctaaggcgggtgggaggcagcattcccagtgcttgcaggaggagcaggactgcttgtgcttgctcaggtgggtggtaggttaggttcttaggcatctgctgggtatcagatgctgcacaagcatcatctccgtgaatttaatctttccatcatccctgagaggtgggcattacaggggcatagtgggattgaaacacaggtcccctgagcctgtgccttttctacaaggcaacttagttcacatgtaataataggacccaaaaatacacctgctatgctgtgctcacctgatttcataacatccttgtgacctgcgaggttggtgtactgtccttattttatggatgagaaaactgaggctcagagaggctgaataattttgctcatccttccaaagaactaaagggaagagaggtgctatagctgtggggccttctattcctgggaggaagtgtgcagtaccccaggccattctgaccctagtgcaggcaggagaaaaggcacatcaacaaatccagcagcaagcttccactgagggcctccctggcctttccttgcactagtgctgagggagaaacagccttgttccttcacctaacatggcttcgtgccgcccccaggataaaggtcagggtcctcaggtctgtgtttgagactcttcatggtctgatcccacctgcatttccagccaaatcctccaccacagcccccagtgcagcagccctggccatctgtcccatcccaccatcctgccttggctcaagctgttccctctgtcccatgctattcacacatagaacaaggagaagtttgatataggctaacctgaagtttccatttgagagcattttcagcttttggaaacagacatttcacccaaaattccagattccctgcttctctgaaaatacatacatacatacatacataaatctgcttttactatgcactattctgttttttgagacagagtttcactcttgttgcccaggctggagtgcagtggtgtgatctccactcaccgcaacctctgccacccaggtccaagtaagtctcctgcctcagcctcctgagtagctgggatttacaggcatgcaccaccatagccggctaattttcatgtactctttttttagtagagatggagtttcacgatgttggtcaggctggtctccaactcctgaactcaggtgatccaccagcctcggcctcccaaagtgctgggattacaggtgtcagtcacctcacttgtccagtctgcactattccttagtgtcagacaatttgagacaaacaatgtctttctcatttggacgtgaccttcagggtctaatttttgtattttcagtatagaccaggttttttttttttttttgacagagtttcactcttgtcccccaggccagacggtgcagtggcatgatctcagctcaatgcaacctctgcctcctcggttcaagtgattcttctgcctcagacttccaagtagctgggattacaggcgcctgccaccacagccggctaattttttgtatttttagtagaaacagggttttaccatgttgggcagactggtctcgaactcctgaccttaggtgatctaccctcttcagcctcccaaagtgtggaattacaggcatgagccagagcctggcctcacctggctaattctttgtatatttgaagagacggggtttcaccatgttggccaggatggtcttgatctcctgacttcgtgatctgctggcctcagcctccaaaagaactgggattagaggtgtgagccactgcacctggcctcaatgtagcttattatcaaagtatttacatagaaacattaatcaaagggcacaagcatttcaatacttaggttaagatgaaatctgtggccggaagagtgccagacacacatgaaatgttttgtgcatgaaggaaccacaacttaaaatgattttctgttattcgttttggtatgttattttggaaatgtgattaatcacgtatgtcaaggacgttgggaagaatttccagatagtctgatatgcatgacatcttaatcatacaatataaagcaaggctatcttaggaaattaggtatcactgccaaggacctttacatgagaagataaattaaaattactattaaatttgtaacagtcagatgggctggcaggcaagttgtgtcatttttttcttagcattttttcttttccttgattcaataaaacaaacttaaacaccagctatctgcagaaccctcactagactaagtttaatgatatgtgaaacacagcctgcacactcacagatccttgccacgttccgttcccatcctctcaaaacctgtgttaccctgtggctagatatttcaaggagttgaaagagagagacgaatgagaaccatcttctttcaggtcgctctgcactgttcttgcaggtagacaatgatctctccggtgaggctattatccttggctggggggtgaggccttaatcctagaaaagaggcctctcagggtggggaggtgatttaaattctttcaagagagacgcagctccccacctcatctggaccttcacaaacctaaactggaaccgccagaaaaatgactgacaacgggccacacaagccaggcagagacgcggagagaggctgaccacaggaaaggtggacgtagaagataccgccctctggcacacagggcacatgtgtcccaacacacacacacgcacacacagacggacacagagctaaagagtgagaaaggggggagagagaaacaagagagagacatacgcacacacacaaacgcacaaagacatacagcagtggcacggtaacacctacccccaggcagcccctgaattttcagggttctgctctccacgactacaacccactggtgagagagcagcccacgggcacacaagcaaacctctccttttttgaagagactcactggcacaccgtccgtgcaggcctgaggctgggaacccgcgctgcttccctggccctccgcccgcagtttcttcctcctggacgaccctccgtgaatcccggcctccagagactatcctgttgatgccctggccaggactggtctcagtcccgactctgactaatccctctagtctcaggtactcgggaggcggaggcaagagaatcacttgaacccgggcggcagagtttgcagtcagctgagatcccgccactgcattcgactgagtgacagagtgagactccgactataaaaaaagaaaaagaaagaaaagaaaaatgaccgcggagcggcggctgcggggactggggcggcggcgggtgaagtgaagattgggagagggccctcgtccaccctccccgaatccaggcctgaggctgggatctcgcgctgccgccctggcgatccgcctgaggtttcttccttctgaggtttcttcctggtggtcgaccctccgagaatcccaggctccggagaccatcctcttaatgccctggccaggactgctctcagacccgactctgacgcacaatcacacggggctcctacttcgcaaagtctcagggacccatcctcgggcaacagtggcaatcactacgaccaaagcggaggttcaggccttgtgcatgcgcactggcgaggccgaatccccgcttgctccggagtcaggcggcgggtcctttaaaaaatggcggcgacgcgcggctgaggggactggggactggggcagcggtggcggcggcagcgcagtccgaggcggcgggtgggaagaggactacgagagggtcctgcaggaggcccaaggtttggacccatagaggtcctgtcatcaggaccttcttgatcggtcttctgcttcggttcccagtggaggaggagcttcagggtgcggctgggctctctggactcctcttcagatctgactatggatcccacggggtgatcaggaatggggttacaatgcagtgaggcgggaagggtctcgctggggcacagaaagatcctaagggctgcaaggcatactgtcagctgaaaatgcactgatccatgagcccactgcctccctccttcctaggtggagctgtggcctgacttcatctccaaggttcggggctctggcatcctgacactgctttccacgacatgtgcaaggagagacagaggcgagtccgagatggagccaatgtgaccacacgtggcactaatgttccccaagagcagatggagtcagtgtgtgtctttgaggctgtatggggcgatgctgagacagatagtgacatccaggtgtgcacaggtgggtcgctgggacctcccacacaaagccaaggaaaagccaagcacactagaaaacctgtgagacagggcctgtgcctgagtccaagccacattcagggatgactgccagaggggccaagaggtttcaacaaatgacaccacaccgacattccgccaccggtaggtacccctgatgccacctcccctgcacccagaaaaacccagtccgtttggctccctgacatccgtggcagccaaaagattcagtgcttggaggcactttccccaggagcagaggaaccagatggccttcaggaatgagagaggaagggcaggtgggatgcaacactaacttttctagaaggcaaaggtcagccacggtggggttgcctcccgcccttcctggactgaccacaaagccatcattgggacatgcagacaaagggagctcccctgtccaagacaggtatggaagcccagaactccaggatcatcataccctatcatccagaaataggtttggagagggaagcaatcataaaagggaccccaatgaaatttctccctaatggactgggaagtgttctttgttgaagacattgagccagactaagaagcctctaggcttcacaggaactgggcagacagagcaagagggaggacagagcagaggccaatgccacagcacaatgccactatcacggacatctgggagaaagtgccaaatgggtgacttggcaggaaggccagcgtttgagtgacagacatgtttgccccatcttgtagccagcttccttctccgtcccagtgtatagctgtgggtagatttctcaatgagggcaaagggtgagaggagtgagaaccatcttcttgaaggtctgtgggcactgtcctgcgggtggacaatgagcacctgtgaggcctttgtccttggctggggtgcagtcgtcttgatcctagcaaggaggcaacacaggatgggaagggtattaagactcctgcaagacaggccggaggcacaaagccccttcactgaagcacagccatggagaactccttctatgccaaaattcagggactggatatcaagacaacagtggaaatcactgtgacgagacaatcagctagagcctcgtggaggcacattggctaggccgactaaagctccggtgctggaagtcaggctgctgccccttgaaacaatggctactgcgcggtagcagaggggctcctgttgcagcctcggcagtgactggatccgaggtccagtttgcggtggcgtgggagagggtaccgcgggtgtgctgtcctggggccaaacccccaggagtcctgtcgtcaggacctccttgaaccaactcccaccaagggagcgggagctttgggatgcctgctgggttcttgggactccccttcagatccaatctgggccccctccgagtgagataggatgggctcaccatatctggtgagacaggcagggcctagctgcagcacagaatgatcccatgggtcttacggcgtggtgtcagttgaaaattcactgatccatcagccctctgcctccctcctcctttgaaagagcactggcctgcccggcttctaaaagccctggggctccggaaggccgaccgcaatttacaggacacgtgcaaacaggaacggggcgaaccccaggtggagaccatgcgatgacgcgtggcactggcccatcccacagcagatggcgtgaatgtgtgtaaccagaggaatgtggggcgaagccaaaacaaacggtggtgtctaggcatgtgcccagtggaaggggggaacaagtgacatttccatcacagcaatgaaaaattaaagaacacctgtgaaccaggagggggcttgtgactgaccggagccaaattttgaaattcctgccagaggagcaaagaggtttccgcaaaattcaacccaccgccaaagctccatcgcccaggtagccctcacacaacgtaccctgcaccaagccccagccccagcaccagccgcagccccagacccagccccagacccagcccagtccccttggttccctgacatccgttacggctaaaagatccagggagtcagtccacccaggagcagaggagaggatgtccctcaagagtgagacaggaagtgcagaggaaatgctacaccacctgtcctagaagacaaggccagtcacggtcgcctagcactcattctaggcaatccacccacccatgaggggaaacacggagaacaagcaagctttcctgtctgagacacttatgggagcaaagagctcaatggtcacgagatctgcccaatcaagcagaaacaggtttgcagagagaagcaatcattacagggatctccaggaaaagtctccctgacagactgggaagtcaagcactgggaagtccctgacggacagggaagacatgtggccagagtgagaggcatctaggccaggggagacagagcaagagggaggacagagcagagggaggacagagcaagagggaggacagagcagaggccgaagcccaggcaggatatagcaccatgtcactgccacgggcataaggggaggggttccaaaagggtggcttgtccagagaggccagcattccagtgacagggattgttgccatctcccatttctggcttcctcttgcagactgtatcatgctgtggcttcatttcccacagaagagcagtgaaaagataaaatcatcttctctgacgtgggtccgctcctcccctgcgggacaaagaactcctgtggggctcttgtactcggctgcagtgtgttcatcttgatactagaaaagaggctgctcaggatggggaggagatttcaattgctccgggaccgatgcatctcctcacgtgggtctggtcttcacacacaaaaagcagctccgcggtggcgaaaacgattgacaaccagcctcatgagccaggcagaaacgcagaaagaggctcaccaaaggctggccgccatgcgagaaatcgctttgtggcacacagggcacattcggctgaagacacacatgcacacggacacaaacacacaaaccggcagagagagggaaagaaacacacagagactgagagacagagagagaagagagaacggaagacacacacacacacccacacacagacagaaacacacacagtcatacagcagacgcattgaaacacacaccactaggcaacccctgaggctgcggggttcggctctcgacgagaacgaccctccggtgagacagcagccaaggggcatgctggccgacctgtcctcgacatcacagcggcatgaattttggggagactcaccccaacaccgtctgggcaggcatgaggctgggatgccgtgctgcttcccctggactccgcctggggtttcctcatcctggtcggccctttgtgactcctggcatccggagacgttgccgtcgatcccatgaagaggtcaggccggagcctcagcgcccggacacccaagcactgcaaaggaggtctcctgctgtgccaagcctcagggactggtttctaagacaaccgtgggaagcactgtgacaggagaagccgctcgcgcctcgcgcatgcgcattggctgggcccacaggcgctgcactccaggtagccaggctgcgtctactttaaataacgccacctctgtgcggcggcaacgaggctcctgctgcagccgcggcgggggctgaatccggggtccagtttggggtggcgtggcagagggggccgcgagtgtcctgtcccagggccaaaccaccaggagtcctgtcctcaggacctccttgagccgacttctacccagggagggggagcttcaggaagcctgctgggttctcgggactcctcttcagatccgatataaacgcactctgagagagataggatgggctcaccacaactggtgaggcaggcagggcctcgctgcagcacagaatgatcccataggtctcaaggagaagtgtcaggtgaaaattcactgatgcatcagccctctgcctccctcctactttgaaagagcagtggcctgtcccgcttctaaaagccctggggctccggaagggcgaccgcaatttacaggacacgggcaaacaggaacaggggcgaaaccgagagggagaccatatgaccacgcgtggcactggcgtatcccacaacagatggtttgcatgtgtgtcaccggaggcatatggggcgacggggaaacaaacggtggtgtccaggcatgcgccggtggaaggggagaacgagtgacctttccatcaatgccaaggaaaatcacagaacacctgggacacggggggtcgggggcctgtgcctgacaaaaggcacgtcttcaaatgtctaccagaggagcaaagaggttctgctctccacgcgaaggaccatggggtgagagagcagcccaggggcacgcagggggacctgtcctcaagatcacggcggcacgattttggggagactctcgctaagaccgtctgcgcaggcctggggccgggatgccgtgctgcttcccatggactctgtctggggattcctcatcctggtcggccctttgcgactcgcggcatccggagacgttgccgtcgacccggtggagaggtcaggccggagcctcagagccccgacacccaagcactgccacggagggctcctgctgtgccaagcctcagggactggtttctgagacaaccgtgggaagcactgtgaccggagaagccgctcgcgcctcgcgcatgtgcattggctaggccgactggcactgcgctcgaggcagtcaggctgcgtcccctttaattaacaccaccactgcgcggcggtagcgaggctcctgctgcagccgcggcggcgggatccagggtccagtttggggcggcatgggagacggggccaccagtgtcctgtcccagggccaaacccccagaagtcctgtcctcaggagctccttaagccaacttccacccagggagagggagctttaggacgcctgctgtgttctccggactccccttcagatccgattttggccacctccaagtgagataggatgggcccaccgtatctgttgaggcaggcaggacctcgctgcagcacggaatgatcccacaggtctcaagtagtagtgtcagcggaaaattcactgatccaccagtcctcttcttcccttttcctttgaaagagcagtggcctgtcccgcttctaaaagccctggggctccggaaggccgactgcgctttacaggacacgtgcaaacaggaacaggggcgaatccgaggtggagaccatgtgaccacgcatggcactggcttatctcacagcagatggtgtgattgtgtgtcacccgaggcatatggggcgacggcgaagaaaacggtggtgtccaggcgtggtccggtagaagggtggtacgagtgacctttcaaccaatgtcaaggaaaatcaaagaacacctgggacccgtggggttgggggcctgtgcctgacccaagacacgttttcaaatgcctaccagaggagcaaagaggttcttctgtccacgagatccaacctcgggtgagagagcagcccagggacacgcaggccaacctctcctcgtgatcacgtcgacacgacttttgggaagactctcgccagcaccatctgggcaggcctgaggctgggatgccgcgctgcttcccctggactccgcctgggctttcctcctcctggtcggccctttgcgactcgcggcatctggagactttgccgtcgacccggtggagaggtcaggccggagcctcagagccccgacacccaagcagtgccacggagggctcctgctgtgccaagcctcagggactggtttctaagacaaccgtgggaagcactgtgacaggagaagcggctcgcgcctcgagcatgcgcattggctgggccgactggtgctgcgctcgaggcagtcaggctgcgtcccctttaattaacgccaccgctgcgcggcggcagcgaggctcctgctgcagccgcggtagcggctggatccagggtccagcatggggcggcatgggagacggggccgcgagtgtcctgtcccagggccaaacccccagaagtcctgtcctcaggagctccttgagccaacttccacccagggagagggagcttcaggacgcctgctgtgttctccggactccctttcagatccgattttggccacctccaagtgagataggatgggcccaccatatctgttgaggcaggcaggacctcgctgcagcatggaatgatcccacaggtctcaagcagtagtgtcagcggaaaattcaccgatccatcagtcctcttcttccctcttcctttgaaagagcagtggcctgtcccgcttctaaaagccctggggctccggaaggccgactgggctttacaggacacgtgcaaacaggaacaggggcgaatccgaggtggagaccatgtgaccatgcgtggcaccggcgtatctcagagcagatggtgtgaatgtgtgtcacccgaggcatacggggcgacggcgaaaaaagcagtggtgtgcaggcatgttccggtggaaggggggaacgagtgacatttccaccaatgccaaggaaagtcaaagaacacctgggacccgtggggtgggtggtctgtgcctgacccaagacacgttttcaaatgcctaccagaggagcaaagaggttctgctctccacgagaaccaccctcgtgtgagagagcagcccagggacacgcaggctgacctctcctcgagatcacggcgacacgacttttgggaagactctcgccaacaccgtctgggcaggcctgaggttgggatcccgtgctgcttcccctggactccgcctggggtttcctcctcctggtcggccctttgcgactcgcggcatccggagacgttgacgtcgacccggtggagaggtcaggccggagccttagagccccgacaagcaagcactgccacggagggctcctgctgtgccaagcctcagggactggtttctaagacaagcgtgggaagcactgtgaacggagaagcccctcgcgcctcgcgcatgagcattggctgggccgactggcgctgcgctccgggcagtcaggctgcgtccgctttaattaacgccaccgctgcacggcggcagtgaggctcctgttgcagccgcggcggcggctggatccagggtccagtttggggcggcatggcagagggggccgcgagtgtcctgtcccagggccaaacccccagaagtcctgtcctcaggagctccttgagccgacttccacccagggagagggagcttcaggacgcctgctgtgttctgcggactccctctcagatccgattttcgccccctccgagtgagatagggtgggctcaccacatctgttgaggcagccaggacctcgctgcagcacggaatgatcccacaggtctcaagcagtagtgtcagcggaaaattcaccgatccatcagtcctcttcttccctcttcctttgaaagagcagtggcctgtcccgcttctaaaagccctggggctccggaaggccgactgggctttacaggacacgtgcaaacaggaactggggtgaatccgaggtggagaccatgtgaccatgcgtggcactggcgtatctcacagtagatggtgtgaatgtgtttcaccggaggcatatggggcgacggcaaaaaaaacagtggtgtgcaggcatgctccggtggaaggggggaacgagtgacatttccaccaatgccaaggaaaatcaaagaacacctgggacccgtggggtgggtggtctgtgcctgacccaagacacgttttcaaatgcctaccagaggagcaaaaaggttctgctctccacgagaaccactctcgtgtgagagagcagaccagggacacgcaggccgacgtctcctcgagatcacggcgacacgacttttgggaagactctcgccaacaccgtctgtgcaggcctgaggctgggatgccgcgctgcttcccccggactccgcctgggctttcctcgtcctggtcggccctttgccactcacggcatctggagactttgcggtcgacccggtggagaggtcaggccggagcctcagagtcccgacacccaagcactgccacggaggtctactgctgtgccaagcctcagggactggtttctaagacaaccgtgggaagcactgtgacaggagaagcggctcgcggctcgcgcatgcgcattggctgggccgactggcgctgcgctccgggcagtcaggctgcgtcccctttaattaacgccaccactgcacggcggcagcgaggctcctgctgcagcggcggcggcggctggatccagggtccagtttggggcggcatggcagagggggccacgagtgtcctgtcccagggccaaacccccagaagtcctgtcctcaggagctccttgagccaacttccacccagggagagggagcttcaggacgcctgctgtgttctccggactccccttcagatccgattttggccacctccaagtgagataggatgggcccaccatatctgttgaggcaggcaggacctcgctgcagcatggaatgatcccacaggtctcaagcagtagtgtcagcggaaaattcactgatccatcagtcctcttcttccctcttcctttgaaagagcagtggcctgtcccgcttctaaaagccctggggctccggaaggccgactgggctttacaggacacgtgcaaacaggaacaggggcgaatcggaggtggagaccatgtgaccatgcgtggcactggtgtatctcacagcagatggtgtgaatgtgtttcaccggaggcatacggggcgacggcgaaaaaaacagtggtgtgcaggcatgctccggtggaaggggggaacgagtgacatttccaccaatgccaaggaaagtcaaagaacacctgggacccgtggggtcggtggtctgtgcctgacccaagacacgttttcaaatgcctaccagaggagcaaagaggttctgctctccacgagaaccaccctcgtgtgagagagcagcccagggacacgcaggctgacctctcctcgagatcacggcgacacgacttttgggaagactctcgccaacaccgtctgggcaggcctgaggttgggatcccgtgctgcttcccctggactccgcctggggtttcctcctcctggtcggccctttgcgactcgcggcatccggagacgttgacgtcgaccgggtggagaggtcaggccggagcctcagaggcccgacacccaagcactgccacggaggtctactgctgtgccaagcctcagggactggtttctaagacaagcgtgggaagcactgtgacaggagaagaggctcgcgcctcgcggatgggcactggctgggccgactggcgctgcgctccgggcagtcaggctgcgtcccctttaattaacgccaccactgcacggcggcagcgaggctcctgctgcagcggcggcggcggctggatccagggtccagtttggggcggcatggcagagggggccacgagtgtcctgtcccagggccaaacccccagaagtcctgtcctcaggagctccttgagccgacttccacccagggagagggagcttcaggacgcctgctgtgttctgtggactccctttcagatccgattttggccccctctgagtgagatagggtgggctcaccacatctcgtgaggcaggcaggacctcgctgcagcacagaatgatcccatacgtctcaaggcatagtgtccgctgaaaattcactgatccatcagccctctgcttccctcctcctttgaaagagccatggcctgtcccgcttctaaaagccctggggctctggaaggccgactgcgctttacaggacacgtgcaaacaggaagaggggcgaatccgaggtggagaccatgtgaccacgcgtggcaccggcgtatctcagagcagatgttgtgaatgtgtgtcacccgaggcatacggggcgacggcaaaagaaacggtggtgtccaggcgtggtccggtggaagggtggtacgagtgacctttccatccatatcaaggataatcaaagaacacctgggacccgtggggttgggggcctgtgcctgacccaagacacgttttcaaatgcctaccagaggagcaaagaggttcttctgtccaccagatccaccctcgggtgagagagcagcccagggacacgcaggccaacctctcctcgtgatcacgtcgacacgacttttgggaagattctcgccagcaccgtctgggcaggcctgaggttgggatcccgtgctgcttcccctggactccgcctggggtttcctcctcctggtcggccctttgcgactcgcggcatccggagacattgacgtcgacccggtggagaggtcaggccggagccttagagccccgacacccaagcagtgccacggagggctcctgctgtgccaagcctcagggactggtttctaagacaagcgtgggaagcactgtgacaggagaagcgctcgtgcctcgcggatgcccattggctgggccgactggcgctgcgctccgggcagtcaggctgcgtcccctttaattaacgccaccgctgcgcggcggcagtgagtctcctgttgcagccgcggcggcggctggatccagggtccagtttggggcggcatggcagagggggccgcgagtgtcctgtcccagggccaaacccccagaaatcctgtcctcaggagctccttgagccgacttccacccagggagagggagcttcaggacgcctgctgtgttctgcagactccctttcagatccgattttcgccccctccgagtgagatagggtgggctcatcacatctggtgaggcaggcacgacctcgctgcaccacagaatgatcccatacgtctcaaggcatagtgtccgctgaaaattcactgatccatcagccctctgcttccctcctcctttgaaagagccttgacctgtcccgcttctaaaagccctggggctccggaaggccgactgggctttacaggacatgtgcaaacaggaagaggggcgaatcggaggtggagaccatgtgaccatgcgtggtactggtgtatctcacagcagatggtgtgaatgtgtgtcaccggaggcatgtggggcgactgtgaaacaaacggtggtgtccaggcatgtgctgttgcaagggggtacgagtgacatttccatcaatgccaaggaaaatcaaagaacacctgcgacccggggtttggtggggcctgtgcctgacccaagccacgttttcaaatgcctgccagaggagcaaagaggtttctgcaaaattcatcccacccctatcctccaccgcccttgtcgccctgatgcaacttcccctgcacccagctccaaccccagcccaagccctagtcgagtccctttggttccctgacattggtttcagccagaagttcaagggagtcaatccacccaggaggagaggagaggatgtccctgaagaatgagacaggaagtgcagaggaaatgcgtcaccacctgtcctataagacaaggccggtcacagtttcctagtgctcatactaggcaatccacccacccatgaggggaaacttggagaagaaggaagcttccctgtctgagacaagtgtggaagccaagagctccagggtcatgagacgtgcccaatcaagcagaaacacatttggagagagaaacaatcatgagacggatctccaggaagtgtctccctgacggactgggaagtcatctttattgaagacatttggccagagtgagaggcatccaggcccctgagaaacaggggaggcagagcaagagggaggacagagcagaggccagagcccacgcaggatacagcatcgtgccactgccacaggcataaggggcggtgaatttctatcccagctttgccatggactggctgcatttccctaggcacggcactcatcctaactgatccccagtttcttgcctctatcaaaagaaactaatgtgaatggaaatggcatgtgtcacagtgatgagtgttcctgatgcacagcagttgcgcacttccagtttactggggttggaaagcgtgtgtggcagtaagaggtccgtgcaaggcggtatggggtcagaacagcctctgtggggccccgctcgctaccgtctagctatggagagcctgagtctcctcactctgaaatcaggccatgtagagccacctgctacctagtactagagggagtgcaggaaaaagtgcagccagtgcttccagacccttccatgtggcctgaagggctccccaccccacctgggtgggctgcacatgcaaaggccacctaggggtggggagcaagctcctggcctctgagcggcctgcccccacgctgtcccctctcagagctcatttccctgcccctccctcctgtctcctcacaccctgccttgtgtcctgggccggggaccctgctcctgtttccagacctgttgccccccagctggcctcgagtccctcctcccgggtggtcacacagtccctcctgtagccggaatctcctgtgtttctccggtttctcctggaatgtctgtctccccccatctgtgaggagccgggcacagggctgaccacccttttcatgctacaccccgcacagagcctcaaacgggtttggtgctcaggaaagacttgtttatggaatgaacggggaatgaacaagtggctggatgggtgggcgaggggccaggctgccctgtcctttcccgacaaggccctggccctgagctggcaggtgctcagcccttctccctctgatccagcgtcctgagctgttcatgtgctagggatgcctttgacatcctccttctcagaataacactttcgagtgcaagagagaacccatatagggctacagaggaaaagtgttgcagtacttatcaaaacattcttttaaaatgcgtgatctagtaattagcatgctgttgcctacgagtgccttaactagcaagacctggtggcagccgtcctaccgactccatgggagcagggaggagagctgtgcagctccagcggtcggcattgctatagggcctggggtgagctcaggctcagtgtgtccagcgtacatttcacagagaggctgaaggcggggaaattgatgatttttcccccatcaagttcacaaagcgctggcttctgtccttgggctctgtggcaggacctccgggaacctgctccactgtcttggggactgcaaagcctgcccctgctttgcccggcccccttgccttgcccccagggtccttgggtagccctcctgggggtctggggacctgagctttagtttcccagccatggtgggggagaagtggtcagggtcagctgcatccccaggcccccacacctggctgttgtgcattgtgagtcccccagcaaggccatagagcagagaggatctcccatcacccccaggctcagctggaactctcctgccggcctggcagaaagctgacatttcctgccctgtgggccaaactcagagctcagcaggggtcagagagtgacagccatgctttcttcctgcaggggccaccctgctgtgagcagttcataagggaggaaggtggagatgccctgttcccaagctatgggacctctcatttgacaaatggggaaactgagacccagaggggacagggacggggcggtcccatggtgagctgaagctggagtggccttgggtgggctgcagtgctgcctgccatcttgtgattcagactttaaggactctagagcactcttggggcacagggacagaatcctagttcccaatcccttaacttcccccagggacctggttctgtgctgaggcccctcaacgcagtcagacccaggttctaccctcaggagacccttggcctggtggactcagaaagaccggctgcacccagcatggtctgatccaggacagagggaagcacaaggggtggggcttggaaaggggtgttgaaggatgcataggagtttgagggagaatggggaagagagggccttgggtagtgtctggcatgcagcttcctctgagcgccatcgacgaagaggtgctcccatctgcccagcgtgctgcacgtcctcggccaagtcccctccctttctgagctgtgtgcttctgtctcgccatccatctgctgtccttgcctccctttcccccacctccctggcacactcacttcagccccgctgccctcccctggcctcagcctcaaggcctttgtggctacagttcccacttcaaggagttccctcttccctcattctgttctcactagctctccagatgtcacctactcaggcagtcttccctgacctctggaatagtctccacccatctctggatttactcaagttctttttttttcctcagcctgttttttttggtctgtcttgccccagcagcatgtgggcccccaggcatgatgtcagcgcatagtagaggctgggcagacgccgctgagcgtgtgagtcaatgctgagtgtggttctggcagcagtgccaggccgtggtgcgctcacagatctgaagtgtaaatggggcctgagcgataggctttctggaaggcctactctattttcctggactccacatctctgaggtcagccttctgcccatggtagggtgaaccccagagcccttagagtctgtcaggccctcccagggaaacttctgtacctgaaataaggccaaatttacaaaataaaagaaggaagctaagaaagcaactgtaacgtgctcccctacagagagcagacaggttatggggggctgaggccctaatcctggctggccctttgtgaagaaataaatgcacccctcaagctggggacttccttgctgggagcaaggcaggcctggagggctcactgaggggttggtggctggattacagagggactgaggcaggacacctgggtgctaggcccagctctggctcagactggtgaccttgggcatggctcctctctgcacctcatttcctcctctcaaagaagcttgggccaccccacctgggacttctgtgatgcagcgagcagaagccaagtactgggtcctaggggctcaagaaacatgctaggagtactcacggaggagcaagggacttggggaaatcatggaagacttcatgaaggaggcatcctttgagcttggaggatgcattgcattctgagaggcagagaaaggcatttcatggtgaggggccagctccggctgaggctctgagttgtgggacattccagagacattggaagcccaaccctagctctctgctcattcctactgtgtccttttttcttattgattcataagaactctttatatattaagcacatgggtcctttttaaacaaacacattatttttcttttattttacttatgattggttttgacatcatacatatttttatgttggcaaatttcccagcctttcctttggtggtctttctggtcccaggatgcttcttgtgtccttaccttgggtccttgctctcctgtgcacatgctggctgctcaggacgtgtctgagactccaattaagttgaagctggaaaatttacagctgtatgaaaatcagaagccagggtgcctttgctgacctgtgcctcccgctgggtttcctgcccatcattccttcttgcctggagtggggtccagctgagaccctaaaggggcctgtgactctctgcagggtgaggcagaggctcatagctgtgatgaagggagagggtggggggacagggagttcccagctggccagtcaccatgtgttcactcatggaaactccattgcaacctcatgagataggtgctatgattagttccattttataggtgagaaaactgcggttcagagaggttatgtggctagcccaaggccacacaagaagggatggagacaggatttgaattcatgccttgttgccccagaactcttatagtttcaagctctcttatggcccttgggctccccattgcctttgggatcaagtctaggctcattaatatgacatctgaggccccctggggtgatgcctcagcctctgtgcctgcacacgctgagcttccctgatatgatggtgtcaaggctgtgcccatctcgtcacaccttccccacaaaccccgaatagtttagatcctggaatggagggctggcagggcttctgtggagtagctgggccagccccctggtttgcacacagtcagggtgggtcttgcccaaggcccagtgcctggagagtgaagctggaatctgcaccaagactgcaggactctggtgctcttagctgtgtcactgtgctatggttagtctcaggcggggttgtcacccctgctgctcgctgctgcctccccactggcagatactcctctaggaagcacccctcctgccactgggttagacacctcccctgggctccagagggcccagcgacttatgactgctgacttctcaccgtctgccctgtgaggcagggtgccccatgaaggcaggcgcccaatgcttcctcttcaagtcctcggtgcccagtgaggacttgaagagggagacccagagagggacagagccctgctccaggtcacacagcaagttggggcagagccaggagtcctagaagggccccaagaccctccaggtctcccctgttcgtgggacttaatggagcccagggatggggcagtgtctgtgatggccaccccagcagagggcactactgcagggcctctgttctctgcttctcccaggggcctggggccaaggacaccctctgtccctcctgcccccaccctctgtgaagaaggatgttctcaagataaaaataccgtcagaaacattccctggtgtttggtgtgactgtcgtccaccctgtggggccagaatcttctgacctggcctcacctcagggcttaagggtggacatttgccttttctagccgcttggtgcagcctctttctggggtccatatgtccagcccccatctttacgccacagaatgtgaggggtcagtgtcactcaaggttcctgcagcttccactttctgagcatcctctgtgggctgggcgcatcccgagcatggaacagcgaggcagatcctgcccttgtgcgttttgtggctccttgcgggccaggggggcttctgaggacatccagcaggccacagggaggcttgggcacagtcagctttccgtcctgttgggaagcctgtttctgctttcagtgcctacgtggtgtcaggaacgccggtcacagtgaacgcctgcaggacccacactgctgcatcgtctctgtgggacagatactgaagccagggcttggcttaccctcgtgacagtctcccgaggtgtgtggggtctcctcattttgcagatggggagtttcaggccccagtcagctggggggctgccaggcctctccagggagggtgacggctgccacctcccagagacccgctggggcgaggcccagtgcccggactgcagcttcgtcaccaccttcaatttcatggcacaccctctgagaggcctggcaggcgacaccagcctcatttttcaggggaagctgagcctcaggaaggggaagtgccttgccctgttccgtgggggatttcagccccatcctcagcccaggccctgccctcccctgcgggacgctgtgggccagcccggcctgttggccctcagtcgtggtcatggggaagcactgcccctgcagcccacctccccatccaggattgtgaccataaccccgggaagcatttgtgggacttggcggggtgagctcacatggcggctgctgtggcccctgcaggtggcgggagctctggccagggcatccggaaggctggctcctgtttgcagggtgctgccctgccctgtgacttcaggaaattcgcttctctgctctacgtctcagtacccctgtgtagagtagagctaattttgccttcctcctagataaaaacaaatccagctggatttgtggtctggggaatgcccctttcaggtagtagggagtgagggacgaggttgggagagcctggtgcaagccaggtgaccagcaggatgtggatagatgctgctgcccacacttctggcccccacccctgcttggctccccatggccctgtggcaatatccgaccttcgctgctcagagttccagctccaggtgactgtgcaggtgacttagcttctctcagcctcagttttcctatctgtccagaggggagaattgtccctcctccaaggcagggctgtgagcatcgggatgactgcagccagctgccaagcatgcagggccaagcacagtgttggctcactcggggaagggggtggacccaagtccctgccgtggaggtccccagctgtttgatgttggcttgtgacagaacctctctgaaactctgcagctcatccacctgtccatccatccacccgtccatccatccacccatccatctctgaacctctgtgtccccatcagttttgaggatggaatggctgagagaggcaaagtgtaggcctgtggcttctgctcccagaatgatgagggatggggaagaaggggctggggattgggggacttggagggtgaagagggactgaagggccactagagaccaggcaggccatcccatttcagaacaagctgagagaggggaagtgactcactcaaggtcacacagcttatgaggggcagagctgggatttgaatctaggtctgtgtgcctgtaaaccactgtcacctgtcccaggaggctgatgatgtgggggtgactcaccaacagttgccttaattccagccagaaaaaccagtgtgacaaaccagcctcggctgtaaccttggaaagggcaggccccatgaactccatggctgggaggtgcggaggtgagaagcatgtcaggtggctcaccgtggagatcctcagagccccttcccaccaacctcttctctgattctcacggcacactggataggaaggcagggggatccctttgacaggtggggaaattgcatctttgggattgcagggaccatgtaggatgtatgtgtacccaaggcaaatctctggcaaattactgatgtgtgcccatccatgtagttagccatgtgcccacctgctcatccatctagtcatctatcctacttgcccaaacaccctatccatccatctacccactcatcacccaccctcacactcatccacccatccatctatccatctacccacccatccatccacccatccacccatccatctatccatctacccacccatccacccacccatccattcacccatctgtccatccatccacccttccatccctctatccattcatttctttacccacccatacactcatccacctgtccatctatccacccatccactcatccactcattcactccacccatccatcacccaacattccatccatccatccatccatgcacccgtcacccattcatccattaatctgttcatccacccactcaaccatatacccacccatccacccagccatccctctatccattcacttcttcactcacccatccactcattcactcacccatccatccacccaatcatctgcccatccatccatcccattcgtctatccatccatccacccacccattacccatccatccacccatccatccatccatccacccattcacccatctatccctccattcattcatctacccatccgctcagtcacccacccatctacccttctgttcatccatccatccaatcatctactttcacacttatccatccatctatccaaccatccatccatccatccattcatccatccatccatccatccatctttccatcctattatccattcatccactcatccattcacccattcatccactcatccatccttcctccatacagccatccaccctcacacccaaccactcattcacccatccatccatccacccacccatgtattcattcatccatatacccactcatccatttatccatccacctacccattcatccctgcattcatttttccacccacctatccatcatccatccatccttccatccatccatccatccatccatccatctacccattcattcatccacccccccagctattcacaactggctccaaggttggcgttgggaaggctctgcaggtggtggctgggagtacaggctgagggcctgaattcctttgtgacagtgggagaattaccacattaactacttctctggaatagtaacaacaatagttccaaccttgtggaattgtgaggattatgtgagatgatgtatgtaaaatgcctactatagtgtctggcatgcaataggcactcaataattgtcagcggtcatttttctctgacactccatcttgttctgctcttctctggttctggatggttgctatgctgtgaaggtgtggggcatcaaaggtgcaggccagaggcccttccatctcctgtggggccctggggaagtgagcagaaatgtgggttcatgtggttatgtcttacttctgtgcccctctgagaagagcagcaccgcctgcagtaacttggctttactcttttaactttaggatgttctagtgactggatcctttccagctggtgcctgggaaatggcagccactactaattcagccttgaagacagtaccgtgcctactcagcaccattacgtagaagacagaactcaagaggtaagagtgaagtcattgacatgctcttgtgcatctaggcattccttccaccagactctcatctgtacatccttcacccctccacccaccatgccatcctttcatcacccattcccccacccatttatctgctcagccttccatccacccacccatgcctccacccctccatccatcccctcgcccatgccatccgttcctcacccattcccccacccattcatctgctcaaccatccatccacccatccttccacccacctagccagtccatctatctgctcacccctatcatccacccacccatctgtcaacccgatttatccacccatctgcctgaccacccacatgttgattcaatcactcttccacccatctcctcatccatcccattcagctgcttagtccttcacccttcatctggctgggatgcatttcctgggtgcccctctttgctagtacctgcatcagcctctctagacctctgagcttggtcagagatggggcctgggcaagatcaactctcacacaaggtgggaagtagcttctggcctgaatgggaaaagcccagtgctagaggatcctaaagggggccaggggaggaggaggaggtggaggaggcggaggagaaggcagctcagtattgtggggcagaaggtggaggaggaagagcaggaggagacttggtgtacagcatccaggaggggaggccagggttcaagagcctttgctgtggagaggctactggagaccctatgaggaaggcccaggagacaaaggttccagcgcaagtagtttcctgggaggtgatcccaggaaataaggaaatgaggtgagaaagagaaggaagtgataaagggcatgtcgttgatacagttactgctggggcactggagctgactcccgctggggaggccagggaagcagtgcccctcccaggggcagcttgctggggcccagccacctgctcccatcagtcactgactgaaagctgtcctggcagcatcagctcctcagcctgccctctgaatggcagagcatgtccacggctagagagagtttttgggcagagagacactggttcgtgtaggaattgagacaggtgggcctgaggtggtaagggcctaggatatcagtggggcacccaccaccccatgccctgcacacagtgatgtgttgctgctgcctctctcctcgggcctagcctgcatttggcataggaagccatcatggcattggacccaaatgtttgagggccatgggttagcttggtggacagaggccaggtgagtctctggtggggaagtttggcctggaaaggggattgggcgtaagaggtcatcatcttcttcccagattatgagacataggaatgccacccaccactctccctctcccctccacaccagcctgggttctcccccatccagccaagcttcctcactgccccagggtgcccagcacgtctttgcctcccactcctggctctggcagtgtcccccagcagtgcccctcctggctgcctgtgcccagcctagccttgatgtggtcctacacccagggcagggcctggcatgagggagagcccctaaccctgcagccagccctgcctctcacaccctatgtgatggagcaagggcaccactggctcagagcctcagtctccccatctgcaaaggaagggctgggctttccaggccccagtgctgcatctgatgaatggtgcctggattaggaaagattctgagctgctctggatgcagtggatgaagctctgtggctgaggaatggtgcttgcctgggcgaggctggagcaggcaccttgggcggggaggcgtgtgccagccttccctgcattgagtgatctccaaggggtcttccaatggtaaggcttgatcatgaggtagagtgccccatctccgaatgagggtgagtggctgtgggttggagtgctggtgagggcccttgaacctgttcttttgagtgccgatttgtggcagtctacatctcatcaccacctgggattgcaggggcttgggaccaaaaggattgcagtgccacgcacacagtcaggcctcaggtcttggtgttgtggggcactggtttcacccctacagcccagcctggaagcttcactcctgaaaggctgtgtaaccatcacagtgactcaatcttcctaggcttccgtctgctcatctggaaaatggggataataatcacagtgtgatggaagggattaaatgaatcagtttattaaagctcttagaagagcacgtggcaggtagtaagcacttgatagatactgagtgctgtgttcgtgcctcatgaggcgccctagctagctgaacagtctctgcatgagggatgggggctgttggcgcctccccctccgagtccctatgtcttaccctgggtgatgcaggcgcctgcactctcccttccagtcagtgctttcttggtgtctgggaatgtgggtccaggccttgccctgggctcctcccagatgtcaccgaaacctgagaagcccagggcctcagggcagtgggcatggggcatccagttccatccggaagcacctcccggtgactcctggaccccacccttaggtcacgtggcagctgccgtctggcatcctctctaaaagctcccagcccaggccctggtctgttcttcaagtggactggtcgctgggaggctgcgtctgtaggcactgtggccagcaggaaagcagggatctccgggggtctgccgggcccgcgctctctccccactgcctgctctctccctcctgggtttgcttcactgccccttggtgttgaaaccgccttgtctagctcaggtagtgtaccccagcgcccctctcccattcccctcccggcgaccctgggaccctggcaggccaaccccggtgtctgtggaaaacggtcctaactttagtagtgagcaccttgtcttggccctggaattgctttgtgacctgggacaagtctctttttctttttggacttggttctcccatctgtgaaatggggagccagccttcttgcttgctaaggcctcttccagcaaaacagtttctctgatttcatgtcttgtctgatttcactgtatgcaccccattgagcaagagccaaaaaggcctgtgtgtccctggtggaggatattgtcctatatttcttaaattgcgaccttgaaggccgcatgtttgtgtaacttcttgccacacctgtgtttacgcaggagtgttcttgggacattgtctagcttgtggtgctagggtttctatgccagggtccccttctgggtctgtctttgtggtgctgtattcaccaagtgcccagtgagggggctcccagcacccctggggagggtctctctctctctctctcacacacacacacatgcacacacggcagagcagggctgtgtgaggctgaggactgacattctgggctccaactctctcttctgctcagtttccaggggtcctgggacaggtgtctttgtcagtttttggctctgagaaatgagggagtggggcatgaacttgaccttgttgatgctctctgtgtggtaaaaccacgcagagaggaacgtcaacagaagtgggggtttccaagcctgtatgacaccatctgggcaggtctggggtgcccagccctggcagagatgccaggagctgtggcagcaccctcaccagtctggtagctggccagtttcgaggccgccagctactgggagcacatgcagaccgggctctctggcctttaattcttgtgattctgttccttgcaggctttgagctgcttggagcaggggctggagcagccatgacccgctggaagtccctcaaggcccctgggccacacaaatccagcccctgtcagctggtggcctcacgccggcgtctgagtgccccggccctggctgcctccttctggagggtccaggaatctggggctgagcccctttcccagcacagcctcaggggtcccccctgccgccagctccctacttccaggcccaggcagaagcagtgtccaccattccggccctgcgtcccagctcctcagcgtcatggtgaggtggtcagccacagcggtgttggggaaggacggcagagtaaggaaaggcatccctgcagagcttgggggcccatggtgggggacggcgctagaggtggtttaaaactcaactctcctgcttaatggctgtgtggcctgggggaagtcacttaacttctctgaacctggatggtggctgcacccccgggttgttgagaggacgatctgagggcagctgttgatggatctgtcccccaaggcgcccaggaccccgcctgctctccctgtgtctctctcaggcggcagttgctgtgtgctgctcggaccagcgggctcggggctaagcaaccaggcagcccctgggagtgttccacagcctggccgggcaggcggctccaccatcacctgttgctcaggtgtttggagcagagctcagaggccgcgcctgctccgaggcccagactagtgtggacgtggccagaagctgggtcacacagaccggggctgagtcctggcattgctgcctcctgcctatgggactgggacaagtccattctggcttctgggcctccaggtccttgtttgtaaagcagggtggcccacccctccctggagggcttgagaggcctgcagaaggctgtgtgcagcgcctggttcacagtggtgccatccccccaggatgttctcttggggcctcagtgtcttcgtaactgagtaatgtggctgcaggtgtgctaagggagaaggctttgtctagctctgaggttatggtgtgactggactgggactgggggtgctgggtccctgtgggcggggaggggtgggcctgtccagctcctccgtcggggctaatgctggaaggcccaggtctccctgcttccagcctagcccagccaaggcaggctgccatccagatgtggctgtgggccaggcggtgccatagcccctagcttgcagatgccctagcctgtcactgacaggccggtgtggggcctttagtgggggcagcacagcctgtgtgtcccgggggtgggcacatcagtggctgagagcaggctttgttctggctggcatggatgccctgctgcggggcctgtcttggggtgcctgaatgtgcagtaggctggcctggagccaggtgctgcctgcagtgagctgagggtggtgctgggaacaggtgacacccctgagcactgcccaggtgccagggtagcagccttgcaatcttccttagagatgcgggaagcaggggctggggagggccctcggctgaggtcagccagggagcagcccatgtctgggtgccagatcttaccctctttggcactgctggtgaccaagaagctgcaagcatggcatgtgggtgtcaggagggtggtgggacccagcttggggtgttcaaagtgggtggcgacaggggtggcaggccgcattctaggccctgggaaggacaacaagaagcaaaagagaaaacgtctcacgcctgtaatcccagcacttcaggaggccgaggcaggtggatcacctgaggtcaagagtttgagaccagcctggccaacatggtgaaaccccgtctctacttaaaatacaaaagttagctggatgtggtggcgggcacctataatcccagctgctcaggaagctgaggcaggagaatcgcttgaacctaggaggcggagatggcagtgagctgaaattgcgccattgcattccagcctaggtgatgagaggaagattctgtctaaaaaagaaaaaaaaaagaaaaaagaaaagaaaaaaaaagaaaatgtgctacccttagggagtggtggtctcagggtggggttgatggttgagtgcccccagctacgttattgttattgctgccgccattgtgcccttagaaagggcagtgctgtggatatagcagggatgggacatgggtcttcctggggcacaaggaggcctctggtgccaaggtggcgaggcagtggcaggatgtcttgcgggagggtgtccagggtgggtttgagggacagcctggtgccaggggctgtggctggatggggagtccgctggaggaggctgggaggtgaagtccgaggggtcaggagcttccctgtgcaggttctgcatgtcctggggggcctctgacattgagcaagggagggataggcaccgactcagcttccacaggccctctgtggctgccatggagactggggggccatcggcagaggcagagaggctggcaagttgtgccccgaactggctgggcaggcactgttagattcaggccttgagggtgggagaaggggtcggatcctaaatagactcttcagagccctcagtgtgggagtgaggtgtggagctgaggtttttggctggagctgctgggggcccgaagggggtggccactcgcactgggaaggcggagtggggagctggcttaggcaagaccagagcatgattgtgggtcaatcagggtggaagcgtcctccagtcacgtctgggggccctgggatgggggtagaggagcctggagccaccagcccagccagacatgctgtcctctctgttccaggagccgccctgcctggagctagcctgggggtgagccagggtcccccaacccccgggatgaccgcggccagccgggccaacccctacagcatcgtgtcattggaggaggacgggctgcacctggtcaccatgtcgggcgccaacggcttcggcaacggcaaggtgcacacgcggcgcaggtgccgcaaccgcttcgtcaagaagaatggccagtgcaacattgcgttcgccaacatggacgagaagtcacagcgctacctggctgacatgttcaccacctgtgtggacatccgctggcgctacatgctgctcatcttctcgctggccttccttgcctcctggctgctgttcggcgtcatcttctgggtcatcgcggtggcacacggtgacctggagccggctgagggccacggccgcacaccctgtgtgatgcaggtgcacggcttcatggcggccttcctcttctccatcgagacgcagaccaccatcggctacgggctgcgctgtgtgacggaggagtgcctggtggccgtcttcatggtggtggcccagtccatcgtgggctgcatcatcgactccttcatgattggtgccatcatggccaagatggcaaggcccaagaagcgggcacagacgctgctgttcagccacaacgccgtggtggccctgcgtgacggcaagctctgcctcatgtggcgtgtgggcaacctgcgcaagagccacattgtggaggcccatgtgcgcgcgcagctcatcaagccgcgggtcaccgaggagggcgagtacatcccgctggaccagatcgacatcgatgtgggcttcgacaagggcctggaccgcatctttctggtgtcgcccatcaccatcttgcatgaaattgacgaggccagcccgctcttcggcatcagccggcaggacctggagacggacgactttgagatcgtggtcatcctggaaggcatggtggaggccacagccatgaccacccaggcccgcagctcctacctggccaatgagatcctgtggggtcaccgctttgagcccgtgctcttcgaggagaagaaccagtacaagattgactactcgcacttccacaagacctatgaggtgccctctacgccccgctgcagtgcgaaggatctggtagagaacaagttcctgctgcccagtgccaactccttctgctatgagaacgagctggccttcctgagccgtgacgaggaggatgaggcggacggagaccaggacggccgaagccgggatggcctcagcccccaggccaggcatgactttgacagactccaggctggcggcggggtcctggagcagcggccctacagacgggggtcagagatctgagccaaccttggccgacatgcagcatccacccctggccggggagaggccccgcggtcgctcaggggccctgggtttgagcagaacgggcccagtgccctgggttgcagactcagtagcgttttagtcgttttatgtttctttgcaaaggcctcagaaggttggccggagagggggcagccagagcggcagcccccggcctcagaggctatcacaggctcagggcaaagaagtggcctcctggggggccaggccacgggggccagggcttctgcctgaagatggagctgcagcctgcggggaagcagcccagctcgatggtgggcccagcctctgctgtccaaggctggctagctgcggtgctccttgctggtttttaacttggggagaaacaccgggtttcagctttctcgaccttagcttgggtgagactgtttacaaaaaaaaaaaaaaccatgcaattggagaaaaaaattttaattcatagggggcaaaaagaacaattagaattccatgggtctgccaggatgcagcagctggctggaggctccagagggttccccgaggtgggaccggcctctccccgtgtatgtgggcactgcagtccctgggcaagcagggtgctctggggccgcactttgtcgagctcacgagccagctaggctctgtttgtgatagaaaaatcaagaccatgttaatgattgtaataaaagctttctgctgtctttggggtgctgggtgggtctgggaagaaagtggtttgagcttttagagtttgcctttgtaccttagagatgtgtctcagggccaggcatgggacctgccatcgagggttcctcctcccaccctcgattttcctgttttgcttctttctccatttctgtccaggcctccgcccaattccacagtgaggggtggttaggagccataggccaggatgcctccttgggaagggaagtcaggatcccaggctaggaggaagctggcagccccgtccccactgggcccacagtgtgagtcgtgcgttagagactccgtgttgtcctgttctttctgggctcgctcatctccctgcaaccctgtcccaccccacctcgcccatacctccgctgctgaagttcctccagcccctctgtctgccttgtgaatgtggcaggggccaggtctgcctgacataggaccacatcctgtccctccctcacctggagcagcacagcagagttcaggcagggcacagccaggccctggtcaacgctgaatggcagaggaaagatcttaggaaaggagaggaatcactaccccctcctgccaactgggatgaccggaggtgagcgtgtgcgtccggctcttgtgtaggaggctgtgtgtgtgcccatgtgaacccatgtacttgagtgtgtgtctgtgtgcagcctatgcctgctgctcagagcatggtggccaccccctgagcctctgctggtgctgtgctgcccggtccccacccagagggtcctggggggtggggaggagccactgttgggaggcccctgtatagggtgtctgccctgcgtgaggtcatagaatgtcaaattactttaaatggtgaaactggagaattttcatgttattttcaatgcacagcagtatctaaagacataggcgatgagactagatcacattaagtgcattttgatctctttgaggtcccctgtgtcgagatgtgttttctgaaggtcccctgcatggctccacagcgtgctgggcatccacccggcttcctcagcctccgccttgggtgggggtttcctggggcttcctcatgggtgagggtggggcatggtggcagttgttgggagacggaacagagctcaccctccttgcagctcccagtggtctccagcaagcacacagggcttgtcccatgatgtcacctctcccaggtggcagggccgagcctcctgccttcccttccttctgcaaggatgtgctgggtgcctgcagttgcagcagtgccctccccagctgggggaggctgacctgagacaggcaactcctttcccaggaggggaagccctgctccagcttgtagcaggcaggggccgaggaagagtttcagagcgtgccaatgtctccactgaggtgacgagacaagcctggagtggggtgagggaacacacacggcccagttttgggaaactagactttcatctgtaccttgaggctcagccccagatctccaaggtcttcagcagggacttgtggggagagaattccttcccttcccaaactatgtgagtggagagttctccactcctctgcatcagcaaaggactcagggcaccctctttctgcaggatttcgatgatgattccagacaatcatggataagaatcccctgcccgagtcattcctgggtgatggtgccgtgcatggcagaatgtggagcaggggtttgggtgccagggcctagggggtcatgaaggcttcccaatgggagctcccttgggttggacttggggtgacccggggaccctggaggtggcttggtttggtggggacctcctttctgactctggggccctcctaggaccccagtagcaggatctaagccaactggggccaaaacacggtggcatctgtctccactgcactcaagccctccgggccattcccatggcactgactggtaggcatgaggccctggccccagttggtgctcaacaaatgcttatcgtagagtctccaggtgcgctgtcctggctgcactaatgccgcatagggccctgggtcagaatgcaggccactcatttgctgggggacctcctgtgaattcctttccccctccagcctcggtctcctgatctgcaaaaagggagtgttcataagaatggccagctcacaggtttgttggaaaggaggagaaagaaccctgacatagtgagtgctcctcagtgcctgccttctgctaagtcagattgcactggcactgcccgccctcctgaggggcacccggaggtgctgctctggctcaaggtcacagcaaggaacacatagcccaggcctaaccccaggtctgcgtgacttccatgcacttccctgcctctccagggatgatgtgagcccaatccagaatctgctttaaaacaggtagagctgggatgggggtggagagcttgtgagtgttcactgagcgcctgcgagcttgatgtttgaggtctgtcaggccccacccttgatcttgggctggcccctgtcagcaggcctcagaggcactgctaacctattttagaggaggttggtcgagggaagctaagggacttgctcgaggcccccacagttcctcaagctgggatctaagccaggccctggacccttcggtcagttgacccagatgctgccaccctgctggccactggacaccacagggcctctgcctgctggtgaccagggctgggctgcggtctctgccagtggaggggtgccccagctggggcttgccctggactcatctccacttttcccttcctaaaaccggtctgcagggaggacccccacaacttgggaggaatcacagcccagatcagagctgcctgtgtgctccccaacagtagtggggccgccaaggacacgtcggacccccttcagcccactctccacccagcaccagagtggtcttcttacaaccagaatcaggccttgcagccccctgtctgaaacaccccctggcttctccctaacactggcaataaaatcccagctgctccctgcccgttcacctctgcaagcccgcgccatgcagcccaaccttccctgctctccctcctgctcctgaccctctgctgcaggcaccctgtcccttgggtttcctgacattccacatgtccccttaccccaggacctttgcgcgtgccttccctctgcctgacactttcccctcaggtcttagcagacccagctcctcaattttcgagtctaggcctttctggacccagtgcgagggatggcagatgctccctctggaggcagtcatcacccccaggcttgctgtctgctgtcctcaccaggctgcgagctctgtggggcagggactgccatctcggtccccgctggtgcccagtgccaggagcagggcatggaggagctccatgtgtgcttggatggggggtgtgggccctgcaggcgtctctcccacacagagggctctacaggtcttgccacctgaggccccctttttgctgacccagccaggatggggcccagccaccagccacacccaggggagagcagcccagcctggggtaactggaaccgggaaccaggaacagagcggacaagggcttttgtgctgaaggcgatttgagcccaaggaaggctctgggtactccacccgctttcctcctcggtgctgccaagaaaacatagaaggcggctcccctttcacccacagctggactgggacctggatggcctggcttctggactctgcccttaagtgtttatgactggccaactctgggcctcagttgccttctatggaacaagaactccattcattccttcagacaagtgtttatgagctgccactgtgagcatcaggggccaggtgggaaggaagccaggcccagcagatggtgaacaagagtctgggcctgagtcctctacaagcggggattctgctgcaggggaaggataggggagaggggagcagcctaggcaggaaggagctgaggaaggatatgggtgccactggagcccatcactgtctggcactcctaggagtgtgaagaggggcaaggggttgtcctccttaggtgaggggggtggggcggcggtggcagctattgcgctcattggtcactccttgcttgcagccaccctgggagaggaggtggctcctatggatccaggactattctccagaggagggtggcagggagatgggcactcctcccaggaaccggatctgggtggccccaaccatgtccactgcagcaaggagctacagagcagcgtggtcccaggatccagcgggacacatgcaggggctgcgtccggaggcacggaggcctggctggagggaccggggacctcccaaaggaagtgacacttcctctgggatctgtgggatgactgggtgtttgccaggcacacagggaagtgcttcccagggagagggacaggcacaaccaaaggccttgcagtgggagacagaagaaggaagatgcttggctggggtgggcgggtcaccgagagcccaaggactctgtgcagggcccagcctcagtcttgttctcagcccctccccggcctccaccatagccacagcatggctgcattgcccaacccagaatatcagcccttgggagcaggacttttttgttctgctttgttcgtagctgggtcccagcccccagaactgcaagcactggcacccagtaggctctcagtaaatccttagctgcttcaagatgtaaaaggaccttcaagccagagttggtgcagtgtgggcctgtccctggggtgcctgggaccctgctgcagggcagggtagggtggtaaccaccagtgaccaggagcaggaagggatagggtccacaaggggtcccaggggctcctctgcacagctaatgccagaggtgctggggggtgggccacacaagcaaccccagcctcaaattagggacccaccgaccaggatccactgtgctgtcagaataacatttcgaaaggcaaaaaataaaacacactgagtttcaaaggaaatctgttttattgaaatgcagttatcaaaatatgaacagatacattggtggtatactaatggctctatttcctcacggacctgctaatggcctctgcctccctggctggtgagcacagcccctcccaagggggccagcaatgtcacagggcatgggaatgcctcctgatctgtgggcgacaggatagtaggcactgggcactgctcacccttgtctgtcaaggaagaaattgcaaaacttctctgagagtgagacgaagttgagattgaatgcttctcatttcccagtgcacgtgccctgaggcttatccccagaccctgagggagttcaggccacaggggctgggctgggccagagtaatttcttgaacccagtgctgaatctcagagtcagagcactcctgcccgccccaacccccagcccccaagtctgctcgacctgagggaggatggggtgctccctacggaacaccaggacagttcaagggtcttcgccctgcacttgtttggaggctgcaatggtgggtcgtgactttcacttcatggctgttagagggcactccctttgcacttagcccagaagccgtaaacactatgaatgccatggacaagtgaatagcagggaatgaaagctaggggtcctcttaggcatgaccctatgccagtcctggagccacccagagaggacatctgaggactctgaagaccttggctgcactaacttctctgtgcctgttctctcctctgtaaaatggggctgatgatcataaagccacaggtaaaagtaggcaaccgcctgtggcagcacctggcacaggggcactgcctgagcaccagctttcctctctagctgccttatctggggtacaagcatcccaggcggggcaaccctggactggtgctctgtggctggaggagaaagggaaggccagtggggctgggccagttagagccggggaggaggaatgggctggggctggggctgggatctgctgactccagtgtgatagaagcaagaaagacccctgacatgtttgacttttcaggatcattcctgttgccatgtaggaagcaggccagggaggagggccctgggactgggctgagtgtgcagcccaaaaagtggcccgaggaaacatcgcggcatccaggctggtctgtggacttgggtgggagcagccaggcagatggggaggactaaggaggagaagcttgcggagagtgatggcctctctggatgctttaaaatgcaaacaaaggcacagccactttggaggttggtttgcagtttcttgataaagttaaacgtacacttgtcagacggtcctgccgtttgttaactaggtactactgaagagaaatgagactcatgttcacacaaaaacttgtaagtggatgtttatagcagtgttactagtaatcgcccaaacaaggaagtggcccacacgtgcctcacctggtgaggggacaagcaagccgtggcccaccccgagatggaagcgtcccgagcagggagaaaggatattgacacctggcaccataaatgtgtcccaaaggaagcggcagagcggaaggagccaggccccgccacttcctgctgtgggtcccacatgtgtccatggaagctgtgaatggagtaggggatggagaacacatccgcagctgccaggggctgagggtggaggcgtggttaccatgagggaaaggaggcagttttggggcttggtgtcttgaatatggctacacggatatgtgcactttgtcaaaactcacaggacggtgcacagcaaaggatgagtataggtacattacaccttaaattttttttaaagtggggaaagaaaaagaagttgccacaaaaaccttgtatgttgagccatcagcctgtctggatttcagacacattggaggagaggtcgggtctgtagtttgagactggggagccaccagctgtggacagagtcaagtgactgagagattaaagacaccagacacctagacactgaggatgtggcaaggtgaggttgggagagggcatggggtggaaggcattgggaatgacagaggcaaattggcaggaagattgacacacagataaaaagagatggttggatgagcagaaagacaggcagagagacagacgtggactaacagacaggcagaaagtggatacagagacaaatatccactaactgagcaacaggtagacagaaagatgctgtaaagatagaaaattgtgtaagtagatggatggagctaagggtagctctcaggtggacacagacagaaatgcagacagatgtcttggcttacgagtgcatgaacagcctgccctgattttctggggcattcttctagatcttggatctatggtgttggcattgacttacgccctctttggagtcagagacgactcctctcgctcagtgccctgctccacacttccctgctgctgggccggccactgctgcacaagtggctgcagaaatccctcctggcagggactaaggcaggcaggctgggctgctgtggaccccgggccattttctgagttgggaaaagggtgctgtccaggtggtgtgggccgtgtaaaggcagtaaagggtttcaaaaggcctgtcagtgcatatcatctggagtagggtgtgtgctggggaacggggaggaggaggacagagaaaataggaaactttgagcttgcctgaggaagaacatccacatggattatgaaggatggctcatattgactgtattttcattcaaatgtgcaaaactatttactgaatttttttactgaccggaaataactcctgacttacagaatattttcatttccaagttacactttaccctgagttacatagcaggcgcatccgtagtgattctgcaccccacgccctcgccagcccctggaagacactggctggcccttggctgaaatgacccaaatcaaaagcccctgcctttctgctaatgggcgttggggagattgaccagcaaagagctatggacaagaagcaggactgtccatttaaaaaggacaaaaatcagagcccagtcccaggcctgggcagctcctgtcaacatcccatcccccttgcactgaaccagctgtggcccgcactttttcccatggtcatgcctgggaaatgaaggtgcagggacatgcaggcgagctggggcgtggagtcacatctgtttccagaacattcatgctaagggaggaacagggtccgcattggagaacatggggcaggtgactggaaaaagggaagctagagccacttttattgtttcccggggtaacagaaaacttggagccacaagtgagtcccgggagagtttgggttaactggccccgaagccatcctgtgtcgtgtgtgtatgtgtgtgtgtgtatgtgtgttccactatgtgtttttccctgtgtggcctcagtgtgtgtgtgtttgcctgaactgctttcagcggtgaaaatcctggtgctgacatggacagcatccatgaaagcatttcgagtcctaagtcagctgacctatgttgggatgtggcacatgttgcatcgtctgcctttgaaaagggattttctgcgagggcttgcaatgaaggcattctgctcagaaaatggcggcaggaagtcatgcccccaaaaggagccattagtgaatcccactattaattgtaagtcttagattctgggctcaatactgtcattttcatgatgttcaagtgatataaagggccaaacaatgtgaatctcaaaactaatgtgggaatagaatacttcctgctctttgactgtttgactaagcacatacatcaacctttccatatttttatttattttgttgttgcttgttttgggtttaaggggaaactttcatgataattgtaccctgaagccattttcctggaatgtgtctaggcaagggattccaactggaacccgtggaggccaggaaaacactagtcatcaggatgtattgcttcatctggggaacaccgtaagggactcaactccaggcactggtgtctggctcttgtgcgtttgctaaattgacatgactccaggatctgtagcaggcccacacatccttgatgaatacagtgaagtcttgtttttaccagcactcagttggccaaatatcttttccagcaatgagatatcagaggacacagtgaagttattcaaattagggtggaaaaatcaccaaaattcacttaaaatcatgtttatcgaaagtcccagtgggatcaggttaggtagtaaataacaatacagaatgaaaattttaacgagattccaattttaagcttgtcttttttcctttatgtttcattatttactcattgtacattcacagaaatacatttgctaagcaaagagaatgacatttggaagataagtgattaaatagggtctaaactagttgcaacaactgacaccaccaccagtaacatgggctgttcattgaactctggcaacaattaaacatctattcatcagtatctaagatacaaaaataaaactttcatctctaaaatagtaaggtatatgttcaaacaatgcatccttaattttttttagagacagggtctcgctgtgttgcccaggcaggtcttgaactcctgacctcaagcaattctcccacctaggcctcccaaagtgctgggattataggcatgagccaccacgcctggccatccttaatttttaagactccaaattaagttggaatagactgatatatctaaatcagatgaagcatgtttctctttaaaggagggaacttacaaaacagaagtatttttgttacatgagctaagaggcaataaagccttatttgacagtgtgctaggtacccatgatggcagcatgaagacaaaaacaggaggaatcaaagcaattgtactgtgcagataacatggttctttagggtcaaaggaaggcttcctttgtgctctattaatgaagcatagtattcatgatgcgtgaacgtggaatgaattcccaatgtcctttggcacagaaccacactcatttcatgaagtgtttatgaactgttgatggctgcttttacaaaaccatggcagaattgagtagttgtgacagagaccatatggcctacgaagcctaaaatatttaatatctcaccatttatagaaaaagtttggagatctctgatgtaagctccaagaagcagccaactttgtctgttttgtgcacagacattctagctcataaggaaggcacttttcgaatttgtctgtaatggatgaatggacagacagatgggtggatggacgcatggatggatggactgttcccacacagtgttggagttgaccaatggtcagaccatacatttatggcagcagaatctacaagctaatgggagcttatcccacaggtttcagccacttactgtgaagcaggcttagaaaagaccaagagtggggctctcccaggaagaagtgatagatggggagcaggtggtgctgatggaaggggctgagtggggtctgtggaggccgccatgggtgaggaggacgtggaggctacaggcgctgatggacaggggaaagttggcattagatgccagcctgcatgaccagagaacgcagagcagctctcgtgatgacgctgtacccaaactccactttctaaattgcattttctgtccctttcatccgaatcatcccccacctatcaaaggacttttccacccctggctcctcctgtgctcgcccaccaaatgcaagggagctgttttcctcatgctatgggctgtgtccccgcaattcatatgttgaagccctaaccctggtgcctcagaatgtgactgcatttgaagatgggatctttaaagaggtaattaaagtggagtgaggtgatgagggtggccctaattcaatcggactgatgtccttataagaagagattagaatgaaggtgtgcacagagggtcaaccatgtgaggactgacacagggagaagacggccgtctacaagccaaggaaaagcctgaggtgacaccttttcccaggatccccgtggcagactgattgcatttgatcacttccaggatgaagagggcagcaagatgttctccctggaagaggcacttactctgaatatgggcttatcttctctgcccgcaatctttccatggaagtatgatctgttaaccacagaccttttcaccatcatggtgtcccactcagaattgctctgactcaggaagctactttatatcaaaggaatgtggcaacgggtcagtgcttgtggaattcactgatgctgccttgttccctgccttccaaaagcagctgatctgggagaatagtggaatggagatttttctctctgaggcaaaggaaaaaagaaagaactttacttgattatgactttctctcaatagaaacaccatattgccaaatgctgcagatactaatatgaatggatgacaaggcagcagtccttgccagcacactcaagcagggtcagagaagacacattgcagtggatggaatcacggcccctgaattatccaggccctcacccctggaacctaggacagttccctgacacagagaaaggatctttgcagatgtgatttaaattaaggtcttgagaagtgggggattatgatagatgacccaggtggtcctaaatgcaatcacatgtgtctttatcagagggaggcagagggacattttactacagacagaagaggaggtggccatgtgaccatggaggcagagggtggaggtggccagcagccactagaaactgaaggaggcgaggattggggtctcctggagcctgtggagggagcgcggccctgctgacaccttgattccagcccagtgaggcaggtttaggactcctggcctctgaactgtgacagaataaatatttgttgtcttcagccaccaagtttgtgctaatttgttacagcaaccacgggaaatgaatatatccatgccaaaattaatacatgccttccattttatattcttttccaaccttaaaataaaaccaacaagtgcttccagattttcttttataattctctttgtgcattcagttcagtaaatgttcaaaagggtaatacgtttataaaatgtgatgccaaattgcataaaattgaccagactaaaggggaaaatttaccattttatgaaataaaatataatttatagatcaccagcattaatttatatcatgtcctgctttgggcttccaaattctgttggcaattttaccctggaaaaatatcatgaaccaaataggaaaactggtattctaaatacatttccttcatgtgacacacttcttgtgtgtggatgtaatgagaattcaagaaaagaaaaaaaatgacgtgtttttattcctccctttattgccaaaatttaggcagtaaaaacaggcaccaaaggaatgagttaagatagatttagaagaggacaagtggaagccaggcagggcagaattctaagataagggtcaagatcctcaccctcctcctcagcggtggccctgggatgtgatgcgatgtcactcccatggttatggcacattacatggcaaagacgatttccgcagatgcggagatacaggctcttctgatggtcttcaaggggaaaaagccatgttgtggagacagccacctggtggggaatggataggctttaatccttctttaaatgtttggtagcattcaacaggggagaatgctgtagtttgcatgttcgacctcttaaaaatctcacgttgagatttatccccagtgttggcgatggggcctaatgggaggcatctgggttatgggggtggattcctcatgaatagattagtgctttccctcagggtgagtgagctcttgttctactagttcctgggagagctggttgttaaaaagagcctggcacctcctccctctctctcttgcctcctgtctcgccctgtgacctctgtgcacactggcttcccttccccttctgccacgagtggaagctccttgaggcctcaccagaaacagatgttggtgccatgcttcctatacaggctgcagaactgtgagccaaacaaatgtcttttctttataaattacctagccgcagggattcctttatagcaacaagtaacagactaaggtatttgctgttttgtataaatggaatcacacaacatgtggccttttgtgactggcttgtttcacttagcatcattttttcagcattcatgcatgtggttgtgtgtatcaggacttcattctttttatggctgaataacaatccattgtatgtatacaccacatttgatgcactccgcactccttcatctgttgctggacacttgggttgtttaccccttttggctgttatgaataatactgctattaacactggcatgcaagtatctgtttgagtccctattttcaatgctttctggattatacctaggcgtggaaatgcagggccatatggtaattctatgtttaactttttgaggaaactccatgccgtttgccatagcagctgcaccattttccattcccaccagcaatatacaagagttccaatttctccacatccttgccaacacttgttattttccattaaaaacattacaggcatcctagtaggtatgaagtgctatctcattatggttttgagtttcatttccccagtgacaaatgatatgagaatctggtggcccagtgggcttggagattcactgggctggatggtgggaagggttcacctgcctccttcgtgccctcccagagctcaggatgctttgtgatgtgggcctaaactctagtcaggagagcatattctctgctcaggtgcctgaggtggctgtgagcttcagatgatgaagaattttgtttggtttcttctgcattttaatgagccctggaactttggttccattttttcatttgtatggagttgggatcatctttctgccatctgactgcattcggtggtgtccacatttgccagtttggaaaaaacatgtacccaaatcaggtaatgaaacccaagggctgcccactgaaacagtaggctttcatcttcccttcccaactcccatttttctaaatctattattgggatggaaagacctagggatggggactcttgggagatttaaacatcagtagtctagaataggttgagcagggcagtagtctagaataggttgagcagggaccccctgctaggcatggggcaggcttccagggctaagccccacactgcagtgcaggttgtggaccagcttccctgccccctgccacctgcccaatgcaggagtctctgggccatgccattcccttttgatgggctgggctggatagtgctgctggcctcagcaggctggtgggacccacaggagctgtctcaggggctggaccctgcagaatgcagcctgcatgtgcctgaacagctgagattccatgccccacaatttagaaatccatgtagaaaagaactctttatttgagattggtggagaaggatcagaagaccatatttttaaaatcaatgtttatatatgtatgtatgtatttattttttatttagttttgcacctacactatacacaggatcaatcaattttaaaaatgaataacacgaaaaagagacagatctcaatgaaaccatgtaagattattgatcacatgattcttaatcacgctctctcaggatctcaaactcaccaacatggacctgcctcctggattccgtggcgaacaggctgtgagagtgtcccttctggttctgctcacaggctacagagggcagcaaacaggacgagaatctgtcatcgactcaagagcagccagagacccttagcagtggagggagaaataggtgtacaggactcaagacccctcgcccaggaagatgagcaggtcctgcaccccagttcctgccatggggtccaataagaggaacttagtgtcagtgatttcttcttctgaagagagggaagggtaagcctagccatggcatgaagccttgggcagagcccaggcccactgagcagcagagccatctcttgggtaaagggcatatggacacccagagacaagtgagccattgcctggagcccccagaggacggcaggctcgtgcctggagccaacacaaggaaaagaagtccacccaagggggtgctcaaggcccaggcagagccaccctgtgattgcagggcacccacctccccgagcacagcagagggcagagggctgcagctctgtgcgcctgagtgtcagagagctccacacaataagaaggtcacaggcagcgtccgagaaaccaagcaaccttgcagtcacccactcccaggcttctagggaatgttttctcagccagatcctgacagcccggaccagagcagcagggccatgggccatgctcacacatggcagtttccttgagtcacccagaaagtcctcctccatcctcaatttcagcaaaatgatggccttacttctcactaccagccacgctgaatcttcctgaatggatacatttatttaccaaggaaggacagtgttttttcctctctgtgctgagtttgggggaagtttagactatcccaggaactggagctgagggaaaaggttggcttcagctctttcagagagccggcttggacttctggaaactgaccagcacctggcagggggtttgaagccacgtgggacacccatggtcatcccaggtttcttcacttgtttctgtgaatactgcctttagaaaaccaatacaaaaaacaacgaacaaacaaacaaacaaacaaaaaacaaacccaagcactcagggacttagaaagtgagaagactcatcaaagaacaagcgtcaggacctggtcttgtcagtccttccgtgccctcgttctactgaactgcatagccaccagggtgccggggctgcacgggaaccagacagtcacagttctattgttcagtctccagggcaaaaagagaccagaactttacatatcctgaacatggaattaagatttgggagtcttgaggctctaagttcagaagggtgaggaacaatggccatgactgaatatttgggaggagaacggctttcacgtgttcccagagatctcatccaccccagttggaagctggggacaccagcactgctccccgactcttagcttagcctcagctgaccccgagcttcccctgcccctccctgtatgggaaccccacactcctggcccagcctgtgtcttgacagtggggagggaggctgaggggcaggcaggaagggcagagccctggcacacctggcagtggaaggagaagctgttaccaggcagggcaaagagcacaggaaggcccacaggtcttcaagtagcactcgcttgctctccagccactggaaggagctgatgccatgctagagacatggaaattaactcacagcccaccaccttccccccaccacaagacagccccgcctgaaagtaggcatacttaccttaaaaaaaaaagctcatatggacaggcaaaggaactggcaaagctaatgcaattttgaaaaaacaaggccaggggaggtggctcatgcctataatcccagcactttggaagggtgaggtggacagatcacttgaggccagctattgaagactggcctggccaacgtggtgaagccctgtctctactaaaaacacaaaaattagctgggtctggtggcacacacctgtaatcccagctacccaggaggctgcatcgcttgaccccaggaggcggagattgcagtgagccaagattatgtgctgcagcctgggcaacagagtgtgactctgactcaaaaaaagaaaaaaaaagaaaaaaaagaaagaaaacaagaacaaagttgcccctatttcaacacttattacacagtgaataaagactgtgcccataggcagagggacagacacttcgatcaacaggacagaatggagacccaaattaaagtgcccaagtgatttttgacaaatgtgctcaagcaattcatggggggaaaggtggccgctctgtcacatggaagtagggaaatcgcacatcacaggcacagcaagcaggcaggcagagagagagctcctgatctagactctgaagcctcaccatgtacaaacattcactcgaggtggatcacacacttcaatgtgaaacgcaaaactggaaaactttagggaaaaggattctaagagaaaagttaggtacctagggctaggtaaagatctttgaaggcttgaccgcaaaagcacgatctgtaaagagaagtggataaattggaagtcatcaaaataactcatgctctatgaaagaccctcttaagaggatgaaatgactaaacacagactgggagtctgatccaggactcacatccagaacatataaagaaccctcaaaactcttcaataacttgattgggccatgatcagcctcctggcctcccctccctgcctagaagttcccaggctcctgggcgccctcttggaattagagaatctttcggggtccccggagtgactttccttcctgcatgtgtgacaggaaggggaacccgggcaggaatttacagacactgtactcatcctaatggaatggtcatctattgcatgagacacatcacaagccactgcccaacagcagagagactatggcaaggacaagagagacatgctgcatggggcaggttgcaggccagagtgcagccatgctccggggcctcccggggagatggggtgcacgtccaggtgggagaagtgggctttcaggacaagaggagggatggctttccagggctggggccaattccttcctcatcttccatctctcaattccacattcttcctcctcactcaccacagtcatgggggctgaatttctgaattcctaagactcccctctcccggggaactggtagctgtcctgcccacctctcagatggctcctcccatccctggccacatccacccctggatgcttcttgccctcacacagtcccacagccagccccaaaactgagcgcccacagtgtttagaatcctgcagccgctggccccaggctttgactccacgggctgaggcctttaaggacatcggcagaaccgagccaaaggagcgccgcccacccagccagagaacactgattcagggagatggaaataagatttagttactgagaccttgtttacacaaaaatattctaagagaactcatagatgggagggagtaaaccagtctctgtggcccatggagagaggcttgggacaagtggggtcgtggagaggagccaggagcagaggatgaaaagcaggaagtttcaatgtatgtggtttaaatggcctggctcagcaggaccccagggtttccaagtccactcctggtgaggccctgaataactcatctctgcaggcagcagggagccactgcaggtgtgggagggagggaaggtcgtaatgaatagcgggtttgaaagattcctagggcattttcttcctaatctcatgacggggttaggtaagcagcctcggcctcaaccccactcctgctgccgcctctgccctcagattctgcctctgggtctccaggcagaggtgctgctgccccggagagggtgcttgaccttccaagagttcccactgctcagaggcacacaatttagcttataattagagcatcgaacagggaatactgtgctagttcctaggaaacatttcctctgggcacagtccgccgcatatgctgcaattgcacccaatggcccacccacaggctttgatatcacagatccattttagaccctttctcacaaaggaatggaaagaaaagaaagttgaatgcaaattaagtacactctgtcacagcctcgctatcagggtttcctggatctacagcacataaacctttcaaacatcacactgactacaaagcagtcatcggaatgatccttttgccaaatattcaaagaaaagaagagcaaagcatgtacaaaggttccagagggtgcaaagaaagcctttctattgctaggcataaagctatcacaaagcaacagggctgtgagggtccccagaacaaattagtatatacaaaaagactaagttgctcccttccactggagccaggaacaccttgaaaaaaatgaactggggttgaaggcagctgactcaattacatatatctatatctacacacacacacacacacacacacacacacgcacacacacatattttgccagatctaaaatatactacaaagtgtctctactaaagccataaaatacagcacagcaatagaccagctgacccatgaagactacaaagcctggaaatatcccagctatgtgtgggaatttggtatatgataaaggcatcatgtcaaatcactgaggaaaagatggacttttaaataaatggtgctggggaaactagatggccatcctgaaaacaacgagattgggtacacatctcacatgtcacacaagatcaaactccaatcgactggagatttaaatgtggaaactgaaaccatgtaagaaccagaagtgaacatgagtaattctatgaaaacctgggtgtagagaaggcttttatcattatgcttcaaagaatctgatgcactcacagaatgaactagcaaattaatacataaatattaaatgaaacctttctacatggccaaaaacaccataaatgacagcaaaatacaagtaaaatattgggagacaatgtttgcagcagatagaaggttaatctagctaatatttaaaaagtcttgaaattgacagaaaaaaagaaaaatgtgaatacaaatggtccttaaagcatctttgaatatttgcagctcagatgcagagaccctagggaatcctgctgttggccacctgcaggaggaaacgaaaatgagactgctcaggactgcggggtgagccctacagttctccctggacatggcctgttcagactcaaacccaacccacaccccaggtgtgtagaagcctggtgagggcaggagggggcagcgagggtccacagaaccttcaagtccaccagatgtggcccaccctgagggccgggatcccaacctaggcacttggtggctgaggaaaccatggtgggtgtttggatgactctgcctgggcctgtgtccaaggatgcaaatgaccaccctcagtgattcagccaaggccagggaggcctcgcctcggtcggggagcagcaggtggcaaattggagccctggctgggcaaacaggagccttggctgagttagtgtgacccaggatgagtcaaggctgaatgagttgagtgtccaatcctcttgctggtgggtggggatcacgtcccctcaactggaaacagggcgggctctgagacagctgtgcccactgaagggcggggaaagattcacctgctggtttctggcccaggactgaggacactggcacctttccctgcctgtctcttggggctttcttttcatgatccctgagcctccatggaagaagtccaaccacctgagaccagcaggctggaggccaggtgcaggttctctggaagcaacccttccaaggcacgagtgcggccatccacgtctgaaaccagcccagacaccactgaaaaccatcatgcgtcccaggtggagaccacatagagcagaagaatcttacaggaaagacttgggattcctagaagtattcttggtatgatggtcatacaagaccatagaaagacacacaggtattataatggttgagtttgttccatggaaacagtgggactaattataaatctcattaaaggatatgagcgaagactgaggaccaaactcctgtttaggttaagtgtgtgtacatagatcttctatttacttagaactcttcaggaaatttgcatgagaaatggccaatgactgtctcttggaatgagagccagaggtgatgaacggcattttattttgattttacacactcttcactgtatgatcattttatactaaatatgcataataaaaataaaatcttctgataattagtcacataaatatgagattcacaatatgagagataaaaacatctaaaaacaaaacagacccaggcaattgcatcatatgtgatccagtcctatcactttaaaattatccaaaggaattatgcacatttgctaagattttaaataatgtgattcttctcagttctctataagcgtgacaaattggaagtatgaagttgatctcacactgaatcttgtataaaaacaatgaactctaatgcaatgatttttaaattaaatttacttacataattaaacatgtcaaggaattaaagggaggagtattgtcatctggaatcagaagagctcacagccatctccactgttgattgaagatttgagtgaggggtcttagagactgagtcagtgggctggggtctaggcttcactcctttttggatcaggtaactttaactttgtgtctgtttcattgtttatttagcactgctggtacaaacacagaagagcaattgatcctcacggggtgttcttcagggacagctggtggtaggtgagggtgagctgggaggaaggtggcattttgggagagaaagagtgtccactccccaagcagtttgattttctggggctgtccctttgacaccaaaggcaagcccttactgttcttttctatttctccaagctccctctgagaatcacaggttaagaattttttttgtactagtactaattataaaaacttttgattttactgccaatttaaaaaattatatttcatttttctccattcacaggagcaaatctgtgaacagatgttttgtctgtattgaatatactcttgttctatgtattctgctttcatgaatctagttatgcagtatttaatttttaccctttattgattacaaataccatttcaaggaaagcacagttttttgagtcttgaaggagaaaagggctttccacaggtaaggcaggtgggagtgagatcaagttaggatgttgaccaagaatggtttacacagcaaagcagtgcttacgactacaaaggtgcttgcaggcatctgtctggaggtctcctcaatagcaaagctcctattctgccctttatattaatgtgtttagagcctcactccatttccctggcggcatggactttctcaattttttcacttctggccaccttgtgcagatgtttccagaatggggaatctttattcctgtttctgcccaagttcattcctgggtagttctattatagtttgaatatttgtttcctccaaatcgtatgttgaaatttaccctcagtgttggaggtggggcctaatgggggcagatccttcgtgaatggatttaatgccctccctcaggggtgagtgagctcttgagctctattaatctcagggagagctggttgttaaaaagagcctgaacatcccctgtctctcttgcctcctgtctcagcatgtaatcactgcacaggccagcttcccttccccttctgccacaagaagaagccacttgaggtctcaccaggagcagagcagatggcagcatcatgctttcagtgcagcctgcagaccgtgagccaaacagacctcttttctttataaattacccactctcaggtgttcctttatagctacacgaaacagaccaagacaagctcccttcctccatttgtcacaaccgttgagacacttgttttcttggttttgtttgtcttagttgtttttgactttgcctggtcttcttcctcagttgttatctatatttaggagcatatattttacagggataaaatattcactaacgaatacttctattttattttcacccacattttaaaaagatacaattctcgcttttgtggtagcaaatgtaggagattttcattactaaatggcattttatacatttttcttataggaatttattgatgtacgtatttctaacttcctatatggatcagctcctcacattttcttaccttaaagaatgactttcgtagttcttgacagatgaaagggcttttctcagagactgtagcaggaagacagagcaggtgtgggggttccttagaaggggagggctggggggcaagttgcatgacacacctcctcagctggctcctgggaatgaagacaaggggctgtttaactacagacacactcagcaccatgagaaagctaaaataaacaaacaaaaagctacaggcatatcttggagatattgcaggtttggttccaggccaccacaattaagagagtcacacaaattttttggtctcccagtgcatataacattatgtttacattatatggtagtctatgaagtgtgcaatagcatatgtctaaaacagtgtacacaccttagttaaaaacacttcagtgctaaaaaatgctaacaaccctctgagccattagcaagttgtaatcttttggctgcagagccttgcctcagtgttgatggctacttactgatcagggtggtggttctgaaggttggggtggctgtggcaatgttttttttcttttcttttctttttttttttttagagacagagtctggctctgtcatccaagctggagtgcagtggtgcaatgacagctcactgcagcctcaaactcccaggctcaagtgatcctcctgccttagcctcccgagtagctgggaccacaggtacatgccaccatgcctggctaatttttaaatttttttttttttttgtagagatgtggtccttctatgttgcccaagctggtcttgaactcctggcctcaaatgatcctcccattacctgaagtgctgggattacaggtgtagccactgtgcccagcctgtggcaatttcttaaaataagacaatgatgaaatttgccacattgattgacccttcctctcactaaagatatctctgtagcatgcgatgctgtttgatagcatttgacccacagaagatcttctttcaaaatttgagtcaatcctcttaaatcctgctgctgctttatccactaagtttatgtaatattccaaatcctttgttgtcatttcaaaatgttcacagcatcttcagcagaagcagattctatcacaagaaaccactgcctttgctcatccatcagaagcaactcttcatcagttaatcatgagattgcagcaattcagtcttatcttcaggctccgcttttaattctaagttctcttgcaatttccactacatcagaagtaacctcaactgaagtcttgaacccttcaaagtcatccatgagggttggaatccacttcttccaaactcctgttaatgttgacattttgaccttcttccatgaatcatgaatgtttttaacaaaatctagaacagagactcctttccagtaggttttcaatttactttgcctggatccattagaggaatcactatctatagcagctatagccttatgaaatatatttcttaaatgataaggcttgaaagtctaaaactaccccttgatccacaggctgcagaatggatgtgtgttagcaggcatgaaaacaacattaatctccttgtatatctccatcagagcttctgagtgactacgtgcattgtcaataagcagcaatattttgaagagaatctttttttctgagcaataggtctcaatcacaggcttaaagtgttcagtaaaccatactgtaaacagatgagctgtcatccaggccctgtcgcattcatagagcacaggcagttaatttagcttaattcttaagggccctaggattttcacaatggtaaatgagcactggcttcaatataaagtcaccagctgcattagcccctaacaagagagtcagcttgtcctttgaaacttggaagccaggcattgacttgtcctttctagctatgaaaatcctaggtagcatcttatttcaatagaaggctgtttcatctaaattgaaaatgtgttgtttagtgtagccacctttatcaatgatgttatctagatcttctggagaacttgctgcaacttctacatcggcacttgctgctttacctggcacttttatgttatggagacagcttctttctttcagtctcatgaacaacctctgttagacttcaacttctcttctgcagcttcctcatctctcagggttcatggaattgcagagagttagggtcttgctctggatgaggctttgacccacagctggttccacacccctaaaactttctccagctcagcaataaggttgttttgctttcttatcattcttgtgttcactgagtagcacttttcatttctttcaaaaactttttttttgcattcacaacttggctaaatgtttagcacaagaggtcaaacttttggcctatcttggcttccaacatgccttcctcattaagcttaatcattcctagcttttgatttaaagtgagagctgtgtgactcttcctttcctctgatcgcttagaggccattgtagggttattaactggcgtaacttcaatattgctgcatctcagggaatagggaggcctgaggagagggagagagatgaggaatggcgattgatggagcagtcaacagacaacatttattgattaaatttgccatcttatatggacttggttcatgcctcaaaacaattacaataggaacatgaaagatcactgatcacagatcaccataacagaaataacaataatgaaaaagttttaaatattgtgaaaattaccagagtgtgacacagaggcaggaagtgagcacaggctgttggaaaaacaatgacagatttgcttgatgcatgattaccacaaaccttcaatttgtagaaagcacaatatctgcgttaactcctatttctctggaattgtctcataaacttcaggttgtcaatgagagactgcttggaggctaagcctgctctgaggggctgcagctaccctgcccctggcagtgtctttgaatgcaaggtgtggataaagctggagatttttcgatggagcagaggccagccgggtggttgcactgactcgtgataatcctggtggcagtgctggaggccggtgaggtggtgaagggcatggcgcttcggacatgggcccttcctacgtgcaggacctcctggggtgcagaggctaatttcatcttgtatggatgatgttcctcttcctctgtcaccagagatgagattttgtgttcagatctggctcccataagagtcatgtcatctgcgctgtttttgattttgttctgagcttcccactgtgccctatggctggtgttcccccagtccatggctgtgattacatctctgatacacaaattagctacagcagccttgcttccgggggtgacctggaaatggagaggatgcttgaagtccttgctgcccatgatgcagaagccccacggtcccgggccctgagagactgtctactgggtggtcatggcatggggacagacttgcaggacaagagcactggtcataccaagagaacctgctctgaaaattgaattttgcacaagcctagctgtaacccgaggaccagtttaagctcatatttcctcaaacacactgccctgactcaaagaccaaccttacctccagctgtcactcaccagtcagagctcaccagctcccagaagcttcttcagagccaatgtgctttctttccaaacaatacctaacatttctctaataaaactctcacctttctttttttaaaaaaacttttaatttaggtttgaaggtgcatgttcaggtttgttatcagtttacgtaggtgaactcgtgtcatgggcgtttgttgtacagatttttttcatcacccaggtattaaacccagtacccactagttatcttttctgctcctctccctcctcccaccctccaccctcaagtaagccccattgtgtgttgttcccctctatgtgtccatgtgttgtgatcatttagctcccacttataagtgagaacatgtggtatctggttttctgtttctgccttagtttgctaaggataatggcctcccactccatccatgttcctgaaaaagacgatctcattttttatggctgcatagtgttccatggtgtatatatgccacatgttctttatctaatctgttattgatggtcatttaagttgattccatgtctttgctattgtgaacagtgctgcaatgaatatttgtgtgcatgtgtttttaaagtacaatgatttatattcctctgggtatataaatcccaaatgggattgctgagtcaaatggtagctctgtttttagctctttgaggaattgccacactgctttccacaatggttgaactaataatttgcactcccaccaacaatatacaagctttcccttttctccagcatctgttattttgtgactttttaataataaccattctgacttgtgtgagaagatatcgcattgtggttttgttttgcgtttctctaatgatcagtgatattgagctttttttttcatatgcttgttggtcatatgtatgtcttcttttgaaaagcgtctcttcatgtcctttgcccagtttttaatggggttgtttttctcttgtatatttctttaagttccgtagagatgctgaatattatgtctttgtcagatgcatagtttgcaaatattttctcctattctgtaggttttctgtttactttgttgatggcttcttttgctctgcagaggctcttaagtttaattagattctatctgtcaaattttgcttttgttgcaattgcttttggtgtcttcatcatgaaatttttgtccatttctatgtccaggatggtattgcctaggttgtcttccagggtttttacagttttgggttttacattttagtctttaatccagcagtccacaacctttttggcaccagggactgactctgtggaagacaatgttcccacagagagcagtaggcagggggatgatttcgggatgaaactgttccacttcagatcatcaggtattagttagattctcaaaaggagtgtacaacctagatccctcacatgtgcatttcacgatagggttcgcactcttatgagaatctaatgctgctgctgatctgacgggaggtggagctcaggtggtaatgcttgcttaccagccactcatctcctgctgtgcggcctggttcctaacaagccacagaatggtaccagtccattgcccaggggttggggacctctgctttaatcaatcttgagttaatttttgtatgtggtgagaggaaggggtccagtttcaatcttctgcatatggctagccagctatcccagcaccatttattgaacagagaatcctttccccagtgcttgtttttgtcaggtttgtcaaagatcagatacttgtaggtatgcggccttatttctgggttctctattctgttccattggtctatgtgcctgtttttgtcccggtaccatgctgttttgattactgtagccctgtaatacagtttgaagtcaggtagcgtgatgccttcagctttgttctttctgcttaggattgcccctgggctattctggctctttttggttccatatgaattttaaaataaaaactctcaactttctctttgttcttggaacacactgaagaccacccgatctgtgagtatgccccactttgccattcttgcctcctaaataatcagtgttaagtttagagattcatctctatattttgtttgacttcagcaatgtaaactgtgagtcagagctgcagtggtggaggctgcaaccttggcggcgggaaggtcagttcacagggtttctcggcatgctcctcctgtgtccccactgtctacaggtgccctccatcatatatgtgtgcccttggcttgtagactggcctgatctttccagaactatttttggtcatgcctcatgcatgagcttgtgcctgagcacaatgatgtgaaaattaatttagtcatatcttgtccaaactaaaaacattgaaccattttaaaggaaagcagcttcccaatgttgccatatattgttttaaaataattgtaaaaagtagttgctcatgtaacagcactgggcctgccgttgaccttgcacgagataactcacacacatctgacagcctattactgtggacgcagtcctcagtgctgctgctgcatgggaccctacttcagaggagctctgcaacagcaaaagtgccaagcagatcaaagaggacacagcaggaccatgtggggccctcctcccagtggtcagttacatcttcttttggtatcatggtggaggttgggggtgcccctgaagacaccagctgagcttactgtgcctgcttcccatgcccactgtacccaccatgacaagctgagcatgtttctgtagccatcctctaccctgagtagatactctgcattcttactgtgcaatgctttcaggactgtgcctctgtggtcacccctgtcgtccagctccgttgtggccacgggaaccagaacctggcatgttccagcacctcattcttcaggtagaaatcaacaaaacctcccaaatgggagaggagggcctaaaacccttggaaaatttcctctgtgagatttgcatgagacttggaatgtcctgaagtttaatatatgaaggtatttgaatgacacatagaactccgtgtaagacaggtatagccaacagagaaaaccattcatgtcaacagtctccctcgtgctctttcggagaccctctgaattatagcacccagaggccctggatggcttgggagcggatgagccccacacacaggcaggagagtggcgcattctctgggtaacgaagaatcctatagctagaagattagaaacaattctacatgaaacatttgaaagtatctcttgatcagtttatttgtttctgaagacacagctttcctttcagaaacagtagcccagagaaaggtctccacaaccaaaaagcaccgtgaattgttaattgcattttgcctggccacgtgagtgaatttcctcctggattgcattgaatctgcactgttttggagactggcagatctgtcgttgataaagccacatgtgcagggtcatcatcagttgatgtacttccatcctagctgatgctgttgatttttccctgccaggaagcttcctgacacagcctgcaccccagtggacttcccaaagcaagttgagtctgactttgcacccctgacatgagagtcatctgacttctgggcacgccactgaatactgatgtacctgaaggaaccctgggtaccaaacatgctcaagtgaatgaatggtgtccaggagaaagcccagcaggtgtccagacaatggcctcccaccagagatcttgtcagcacgccggtatgagcactgtgtgccttagtgtctttgtgttctggttgcaatgaagtctttctccataatgtcagtttttatactgtcctagtaggacatcatgtgatgaattttcatgtgatatgaattcagcctaggtatgtcttaggattggtttagagggaagactgaagcaggtgaaatggcaaccccttgaatacacatccttaataaattgaaaaatattcagcatgattaaatggtatcttttaaaataggaaacaaaatatttcctgttcattagagtcattacatcaactaaagtcatcataactaaaatcatcattacatcaactaaaatacaaaatatggaatctaatctgatcttcagcagatgttggcatttctttaagtacacgtcttcacttctgcagtgcactaacagagactcaagaatgacaaagggaaaaaaaaggcaaaattaggaaaaagggagacattttgtagttgatgttggatacactggatggactatccatttgatataccttctcattgatagaagaggaaacttcaggtttcacaaaggcaaatcgtgtttcacgagaaaaagcaacggaaaaatatcgataatcaaaatattttagtgttttatgaagaactgtattgtagcttgaatctttaattaaataagtgttttcttttgcatgtaaaatagaattcagcctttcctaactcaggacagcaatgggctgaagacactgctgggcccatcctgccacctgctgggaggccttgttccctcaaaagccttggtttggaaggatgattggaaaatagctttacacacccatcctttattgtgtttttattcacaaagccttaatataccaccatacttcatgtagttgatttttcatatctctgataagtttttaaatgtcagtattcctactaaagtctctctctctgtcctgtgttgtatgttctagggtgtatgaagaaagggcttcagcagaaacagaggctgaagcctgtgtgctgggggccgagaggccagaggagaatgtgatgagacatagaattggcatggggagtgtccccagacctactgatgactttggctcacagataaccaggtccctgagcaagggtgctgactgcagcctctctgcacaaccaggacaccaccatggggtggggtgcataatgtgtggggacatccacactgttgaaggggagacagccaggaaaaaagaagcggcacctccattgtcaccacgagacacttccccaatgcatcaggtttgcaaaaccaagggtgcagagcagtgtccacacaggctactttttctgttcaaaataagaaccacaaaaaagggctcagtcacagaggctcatgcctgtaataccagcactacaggaggccaaggcaggaggatcgattgagcccaggagttcgagatcagcatgggtaatataggaagaccctgtctataccaaaaaaaaaaaaatttaattagctgggcatggtggctcatgcttgtagtcctagcaacttaggaggctgagtcgggaggatcccttgagccctggagtttgaggctgcagtgagctgtgatggcaccactgcactccagcctgggtatcaaagtgagactctgtctcaaaaaaaccaaaaccaaaaaaccaacaaaacaaaaaagaaccacaaaaaagatgtcatagcaatgctgtgtgtacgggaatctccagcaggacacacaaacaatccagcgctgacctctggagagaaccgagaggctggggatgcggcagggaggggacgtccactccgtgcctggattcctgtgaacatggggccgtgcacagtgcccacgaaaatgaaaatgaaacctgccagcctgctggccagggacttgtagtgaagcacaaacaccacggacgtgactgttgctggtggaggttgcagcctctggatgcctcagtggcgctgttcttgcagctgagcggaaatgcccacagcgtccgcatctggcacgtgcccgggggcctgcagcctcaacagcctcaacccggagatactgatggtgtggaaaggcggagacactgatggtgcgaaaaggaaaaggcgtctgggagggcctgtgagctggagggcagccattggggaggtggaggagaaccgtgaggcgtgtttctccgcatgacagatgtcacctgaaaccacccggatgctggccaaggctttggcctcttcttgctgcctctgtatttctgaaaatgcattgctaatggggtgaagggactcaccctcaggcctgccgccccaccaggctgggccaggacaccaggcacccggcattaccccatcacagccccaggctgcgtgtgtgtgtctgggcgtatctgtatttgcatgtctgtgtctctgtatctatgcaggtatagatatgtatgtctctattatctatatttgtgtgtccatgtatatgtgtgtgtgcctatgcagatgtgtctgtatgtgtgtgcctgtgtgtccatgtgtgtctgtgtgtactgatgtgtgattgtatgtccctgtgtgtctgtatgtgatcatgtgtgtccatgtgtgcacgtgtccgcgtctgtgtgtactcatgtgtgactgtatgtgtccctgtgtgtctgtgttgtgcatacccatgtgtgtctgtgcgcacatgtacatatctgtgtgtagttgtgtctgtgtccctgtgcacccttgtgtagctgggtctgtgtccagctgtgtaaaaggcttcagcaggggaagctgggctctgccacaggccctgatgagagtcaaggccataaaacaaaccctctgagccccaaacacctggtcctaggaacgggctggacttgggagtaagtcagcccagagcgactgtgagggccccaagcctgtgggaacaagaatgaagaggagtcctgggtctggggtccaggcccctcctcagccagtactgagagggcaagagagagatcatagcaggctctgctgactgggctgattctctgccctggagactgcaggccaggggtctccctcttggcctcccctgccactaggtgatgctcagggctgggggtagggacagacacttcatgccctggagctgcctgactggccctggctgtgcctgctgcagaagtggtatcagctgacatcatgaggtgtgacatcactgaggcctcctcgaagttgagtctattactgtggaagaagcccatcagtcctcgtcctcaggaagctcatgattcaggcaaggaaagaggcccacagccagaccactctgatctgtgcagtcaggacatggccacggaatcaggcaggatccagccaggaaaaagaagccctccagttctctccaacagagagaattgcgtctagggagctggtcacactgtgataaaggctctgagagctaaacgggatgaggaggaatccaggattgaaatcagcaggaagccgccatcccaggctggaggcagggaagaaagcaacagggtcaccagtcccaggggctgtgttcatgcgaagggagctggagcctcggcaggggtgtctggagccatggggctggtgggggcaggtggccgctgctaggaggccatccgaggagagacataaggagagacgtgccccgctcccccaccaccaccaagcgcagaagcctgagggcaaaggatactgggaaatgacctgagggtcagagcaggggcccatgggggtgggatggggcccacctgacaggctaggatgggagcacagctaggcctgcagcaggcccgtccccaggggcctgctcaaaccacagcctgccactcatcctagcaggggcctggtctacaacaggtgctcaaaagcatgagtcgcacagtgagtgggtgcagagtgggagataaagccaggtggctggggccccagatgggaaggagaaggaagggatggacactgggtgtgtccatgccgagacctcagaggctctgaatgccagcttgggtttggctgaaatctgagggctggcacgtccccaaacattctctctctcaccataacttgaaaatgagtaagatgtttagccctaaagcatcaaagcccctgactgctcttgtttctgtcctaagctagacagcccagtgttcatttcccccattctccagacaaggaaactgaggcacagaaacatggaggaccttgaccaagtgacgaagtgacctgcccgagatttcagttaggggtggcacagctacagcaaggggcggtggacgcccacccacccccgactttccaaaggtggagagattgctgcaaactgccagcaactggtgacaaccaggagaatgtggtcaagaccgttcagtgacctttcagttctgcctcgttgggtggcaaccgtgcttcaatcaccagtgtttttctccagacagaatataaagaagcagaaacctgtgataacgcatgtgccatctgtgccccaaccacatcctcttgccagggccacaagcccttgcaggactcaagcaagagggtggataaggcaggccaaaggggtggacactcctgactctaggtttcaatttcttaagaaaggctggaaatcaggactttttatggaaacaaatcttagatttgaaaatgctggcccctagttggaatgtttaaagtatgtggaatgaatccatggaggccaggctgagtgcctacagtaggggccaggcctgtgagctctgccagctctgaagcaactttctcaagtgccaagcacatgccgaccacagggcatttgcactgctgctccctgcctggaaagctcttcctgctggcatcttgtgactcatcccgcactgtcttcaggcatctgctcaaatgtctcctccaggaggtcttccctgaccttttccttcccatttcgctggtttatttttctttacagtgctcactaccacctgacatctcagtgttgtcccgctcccgatgagaacatcagctccgtcgtgagggcagggtccttgtcttaggcatccctggatgcacagggcctgcccaacccagagcagacactcagtcaacatttgatgaattcatggtttagcacttcaggacccctgaggcatggccacggggacacagggcacccaggaccatatgcatcacagacgtgatgtctgaaagagaagccagctgagcaggttccagcccttcccaccccacagacttgctgggagctttgggaagccctgaccctctggaggcctcaatttccccacctgtgcagtgaggaggtgatacatgccacagtctcaggagcactcatggggtcccaaggtggccatcattgctggcttcctcagccaagcagagggacagatagattgatcagctccatattgatcgcagggacgcagctgctctggagggggcaggaggagtgggaagctaagtggagccaggacccctggaggaaggaaaagcaaatgccacagccccatcaatgcctgggaccagggggcgggaagggccgtgatcacccatctgagggtttcttcccctgtcacctaggggttcagagaagctcaagggagctccaggggagcccaggccagggcgaattctgaacatggcaaagagacctccccagcgcaccctgaggaggccatctcaaagcttccccgcttctaagtcatggagcagctgaggccgggggctgggccaagggagtcccagggggtccctgcccattcaagccatgacatttcttggatgccgttcactgagtctggaagtgtatgcaaggctggcattctgctgcagagtccacttgaggcttgttttcatacaagagcctcacgtcctgccctggatcttccaggaaagccaacgcccaacagatgagatgctgggaatgtggccagctctctctgggagtgatatccccatgtgggacatgcagctacagcacaaagaaccaggacctaggggtccagggtggggggagggggcctaaggttaaatcccagctccactccaacttgtggggtgaaacccttttcccctgagaaccttgatttcctcatctggagcctgtcccttggggtcctgggtccctggctggagctcctggtttttagggagggaggagtaaaaagcagccttggattggaccgatgggcaggtagggagcccagagggaagacacagacaggatgagaccatgaggactgttgttaaggccttggacagcaagaaaacaaaccattaaacaccagggacagcaactcagccattccgcttctgggcctctacccaaaagcatcaaaacaggtgttcagacaaagcttgtacatgaatgctgataacaatgctgttcacagtagccaagaggtggaaacagccctgagtccacccacagatgaatgaacacaccaagtgtgtccacacaatggaatgtctttcatccatgacatgaagagggtggcattccggcactggtacaacatgcacagactttgagggcacagaaggacaaatgcttagggttccattcatatgaaatgcccagaactggcaaacccatacagacagaaagcagctcagaggcttccaggggctcgggggagggcacacggggagtgagtgtgccgcattttcacgggatcttcttttggagccatggaaacgttttggaactagagagttgtgatgacggcaaaacatcgtgagcagaatgccacttaatttgtacactttaagaagtgcaatttctggctgggcgcggtggctcacgcctgtaatcccagcactttgggaggccaaggcaggtggatcacctgaggtcaggagttcaagactagcctgggcaacatggtgaaaccctgtctctactaaaaatacaaagattagccgggggtggtggagcttgcctgtaatcccagctactcgggaggctgaggcaggagaatcgcttgatcccaggaggcagaggttgcagagctgagactgcgccactgcactccagcttgctcaacagagcaagactctgtctcaaaaaaaaaaaaaaaaaaaaaaaaagaagggccattttaccttatgtgaattttacctcaataaaaacgggggaatccccaaccagggacacaggagaaacagtagcccacgcagagacaaggctgagaggcggggctctggatccggacctgctggggaggagaaggacacccacgcccccggggctgctgtgagggaggagcgctgagcacgggggtccagaagcagagcaagtgaaacatttgctgcgttcattaccatccccagaccatgcttctgcaggacggcccatgcagctcaggctggctgccctgccaggggaggtgcccggccaacccaggccacgcctgtggccacagccccagcagtggccaagagcagagccagagtggggagtcaggtggggtcggccctccctccctggctagttcatgtctcctccctggtcctcacctacctctgggaaggggatagagaccagtcctctaggaagcttccagcaccagaatctttctgcacctggagtcctggggaagacaatcaatcaatcaatctatggatctacccacaggtccaatggagagggaggcagaatggtgcattgggtaagcagtggtgattaagctgacagacaggggttcaaatcccagctcctccacctcccagcccccaccctcaggccccagctgccctagccagcctttctgtgcctcagtttacccacctgtaaaattcaggtagtaatcgccactaccccatagggtattgtgaagatggaatgagtctgtgagaacaacgcctggctcatggtgtgggctccagaggtatgaccactgttgtgtctaattctcactgttgagaattagaacaacaaactgttatccaggtaaggggagaaagaagccctgcccagaattggccagaacgtgaagagtacatgggctaatgccaccagctctgctccctcctaagaagctgtgctgagctcggtgtccggagtggagacccagaggagaggccaggagagaggcagctcgggagaggaccgaggaggtgcccccacactcgctcgcacactcacaaactcactcacacacactgagagtcacacactcacacagagacacagaatcacacacagagtcacacatactcatagttacacaatcacagttacacacacacactcacactctcacagagtcacacatactcatagttacacaatcacagttacacacttacacacactcacattctcacaaagagtcacacactcactcgcacctgctgaggaagagtgctgagtggtcggggtgcgctggccacgcacaggggcagcctcggccccagcagccacacttgatgaattttgcatcaccttggctatgaatagcttcctccttggcagcgagacagacagttcaaagggaggaaaagggcccgaggagggagagggagggcagaatgcaccccgaatccctaactcagctcgggaggacagcagggcgaggcgaggacgcagagggtgggcagggcctcccactcccacagggctgcgtgcatttccagaggcggcaggtgaggctgcaaggggcctcccgcagggccctggcagccccgttatgcttccaagatcaggcccagaaggatgcagctgagacaggagggcatcagggagcccaggcagcacgtgggccacctgcagacccccattccccaagactggggcttcaaggccatttcttagatgggcaccctgaggcctgggaagatcattgtcccatcagagactgcacacagcagcctgggcctggggtgaatgctgaaggaccaggtgagccgacaggcagggccacaggggggtctgggggcatggctaagctgagggtggcaaggggacctctgcagcctctggctggggaacctggcttccaaccccagctccacccccttcccatctgagcggccctgggcaagacacttcacctctctgtgcctgtttccccagtaattaactcataataatgaaagtaccccacttactaggtggtggtcaaggtgcagcctctgggtccctgcggctcaccagctgtggaactttgcctctcagctcagttttcccatctgcagaatgggctgctgctgttgcctgccctgtcagttaggcataaagcattgagaacgagccctccacagcatgaggaccacaggagatttgtcagcactgccagcttcttggccagtgacacccataaacagagagtcccttctgggcaggccctccctgccaccaagggggcatccccaagggttcgagccacatgcctcatcctgccaggctggccagccttggctgaggcccacgcaatgagcaaccaggccagggagctcagtgaggggacaccaggtgggtgtgtgggtagacgccgagcagtcagtcatgtaagcctggctgtcctctctgccgcacttgggtgagcgggtcctacctcaaggctatctcttgtaaactgtggggatgtcccagctgcccactgcctcgccagagacccagtgccggcactacagccccagggccccagcagagtggtgacagcggctgcaccaggcacctactgcatgcaggctgtctcctaagtgctttgtgtgcattaacaattaatcttcaaacccattatctggggcaggtgccgttagcatctctactttacagacagagaaacagaggcccagggagctaagggaacatgcacgggacgtgggaccccaccttcattcctctgtcctcggtggcacctggcatttctgatcctggctcttctattccagtgctggggcatcagggtgggccctttcctctctctggccttggtttccctagcagtgaagggtccaggtgcatagagtctaatccctggcccttctacttgctggcctagaaagtgagtctttcaccctctctgtgcttctgttttctcccctgtaaaatggaaatgggaacggcccctgcctcccaggagtaagctcctagggcagtgcctggcacttagtaagtgctcaggaagtggcagccacgctgttattattgctattgctgttgctgctgtaaagtgagtactccctaagacccctgaccagaggatgggggtgtccaaacatccaggttcccagagaggcccaggaggtggcctgtgcccagagcccaaggcagctgcaggagctcacggcctcccggagtggagagagctgcatcccggtcagccaccctctgttcctccccacagccttccacctgccaggcctacctccatggcgtctctgctcttccctctggccacatcagaagggaccacaaggaagcaaagattcagagagtgaactttcccacagggaccatcccaaagatgcccacactggcctcttgcagccctgctctcccggcagggcctggagcccagagggttccctgcccagcagctaagaacgaggactcttcagagtcccaactgctgtgacccattcctggctctgctgcctacctgctgtgtgaccttgggcaggttgctttgcctctctgtgcccccgtttccccatctccaagacagtagatgatagcagccctaggtgtggtggttgtggagattcagggccatgacatagacaaagcagttagcctggtacccactgggctcctgagcctggtacccactggctcctgaggctgccaacttgctgaagacagcagggctgctggcatcagacattcccagggctacatctttactcattgtgtgaatctgggcaatccacttcacctttctatgccttgatttcctcatctgcgaaacaggcttaataacacctatttggggacatgatgaggattcaaagaggcaaggccaggacagtgcctggcaaacgttgctgtccctgtgactgctgctgctgccattgtcactcctgccatccagaagacacccacagtgtctgtggcttcctctggggcaggccccaccctggaagacattggaggcttcctctccaggtgacaaggaaaagctgaaggctgcatctcctttgttttcttcccagcaagactgacatgcgacaaacacatcagaagggaaagaaaggtcgtgagccctgggcggcaaagccagggcagagcaggggctagggaacaagtggttcccacaaagtagttcctgactctggatcccagaatgtatcccctggaaaccctttaggcatttgtgtttggtccagcctctgtgcccaagcctcagccacctgcctccccaagctcacctgcacacacacacctccgtgttggggcctgagcctcattggctcacctgggagtgtctcacttactgaatccatcagggtcaaagccagttggctcaagacagatgccaaaggccaggtatacttggatcccaatctgagagcttgttaggctgcataacctcaccaactctgagccttagcaaacaacacaaagctgacaagaccatcatgaacaccactgggaaagaatcagtgcagaatcaagggtagctccagtcccctgcagccacaagacacatgacaacccctttagagtttattccccacatacataccaccccgtgacccccatgacctcttttttttttacggagatggagtctcactcttgttgctcaggctggagtgcagtggtgcgatcttggctcactgcaatctctgccttccgggttcagcgattctcctgcctcagcctcttaagtagctgggattacaggcagccgccaccacacccatctaatttttgtatttttagtagagacagtgtttcaccatcttggccaggctggtttcgaactcctgacctcaggtgatctgcccattttggcctcccaaagtgctgggattacaggtatgagacactgcgcccggccgacccttttgtctgttaagccaaactttccattggcttctagtaccttgtatgtgctcctgtctgactgtgtctgcctcctccattagagctcctgggaaggagacaccaagtgagatttctccctgtggtcccagcactacccagcataaggcctgcaaatcggggccaggggagggggcggtgctcagaaaacgttattgatataactcaagattgatttcactacatctaaattgcaaatacggctgcaagttatttgcagcaacttccatgaagaaaggactctgtctcccctccctcaagtcatgtgattgccatgccagtagaaggcagagcaatgctgtgccagttctgagactaggtgtcaaggggccttgccccttccactcttgtgctggggactcctctgccaccagtgacccagccagggctagcccactggggagtgagaggccccctaaagcaccaggcccacatgtcccagctgaggccacagacagtgaccaagtggctgagagcagctgagcccaacaaagaaccgtgagctaattaaaattgttgttgttttctacccctgagtttaggagatgtttgttatggcacaatacctaactgatacacaccataaccccatttcacagggaggagattgagctttcaagggggcagaactcaaggcctcatctccatcaggggctacagcagtgaattaaaagtacacacccagctgggcgcagtggctcacgcctgtaatcccagcactttgggaggccaaggcgggcggatcacgaggtgaggagttcaagaccatcctggccaacatggtgaaaccccatctctactgaaaatacaaaaattagatgggcatggtggtgggtgcctataatcccagctactcgggaggctgaggaaggagaatggcttgaatccgggaggcggaggtggcagtgagccgagatcatgctactgcactccagcctggtgacagagcaagacattgcccccctcccccccgacacacacaaaaaagtacacgcccaggccgggcacagcggctcacgcctgtaaccccagcactttgggaggccgaggtgggtggatcacctgaagtcaggactttgagaccagcctggccaacatggtgaaaacccgtctctactaaaaatacaaaaatattagcttggtgtggtggcgtatgcctgtaatcccagctactcaggaggctgaggcaggagaatcacttgaacatgggaggcgggggttacagtgagccgagactgcgccactgcactccagcctgggcaacagagggagactctgtctcaaaaaaaaaaaaagcgcaaccccagaggatgggtagctgtgaccgtttctgccagcactcttggttgcatcattaaaagcatcattaataaagaggtattgttgcagataaagctcagaccatgggtgccttctaattgctcctgacatttttgccctggctgttcgttgatccagctggcagcctggcccccaccagaaagtgtaaaagggccagccagcgtcagcctcttccccgagatggagccacagggagggaggcttctcctttgcccaggaagccagctgtgccctggatggtttcagaggggagggagcagaggggaggtcggagctagcttggcttcccctgtgcaccctgcagccccagccacaccaggctcggcattttccactcatgcctctacaactgctattctttctgcctggtgcaccattccctctttccttgctagaccaggtccaactcatatgcagcctcaaggcccctccaagttaattgctttgttgtccccactgtctgtcccctagttccagaaaaaacccacctcctctgcaaggcttcccaaaccactcagcccaagactgaaagctccccatttctctccacgagtgccccttgactgtcattgtggctgcttgtttctttgatgtctgttggctccaccagactgagtttggtgagggcgggctgtgggcacggtggcatctacagagcagagtccgcccaccaaggggctctgtggacacgggtgggatgagtgcgtgagtaaatgaataaacagtcgaacaagcgaactcactcacttaccctcctgaggctcacaagcaggagtggaggcagagatcagtagataagcgacgaggggcctggggcccccacagccagtgggacccagaatcccaggaacatggaagccaatgacccagacatggcaccagaggccagccttgctggaagagggctcctgggctcagatctgtgctccctgccagccccatgtgtgagcctcacactggttactttcctctctgtgccttggtttcccaaccacaaggtgaaggcgatggtagctgcttaggcaataattgtggagctcattgtgggttggtatagaaagttggtggaccggagctggttgtgccaatgttggtcattgtttttgagtatttgccatgagcagatgctgggcttacaccggccccaggggacagtgctaggatgcccattttgtaggtgagaaaactgaggcacagagaagtaaagtaactggcccaaggttacacagctggtaagaggcagagccagggttcgaactgaaccctctcttcacagcccagatgctggagggagagacaggaggggcattggcaggaggggtactggcttcctgcccattgcccctctgcccctcccatacgaaccatcagtgacaagggggatggtgggcaggaggcctgctcaaccgggatgctgaacaccgctgcccagcagcccagccattcatcttcactgaccacacagatgccagagccagcctcttagctcacagccagcaaggttaaaaatacacccaaaccatgtttccattgacttggccctgagttacagcctagggcctgtggctgcctccagctcagactccggaggctgtgcgtgccaggctggccggggccacctcccagccagagggaccagctcaccttcttcgcctatgaaaggggctgacccacccctccctgcaggctcatgggagcatttcccagacaccaggcctgcaagaggctcctccagccctgaccctgtggccagcagggagctggccaggccgagtgtgattcaggagaggaagaacggactttggaatttgctgtcgtgtcagttcctcctcctcagctgggaagacctaaagaggggcccgaatgcggagacaaaatcagagccagagggggccaggagaccctggagagggtgccgagctttctgcagccctcagggtgggactgaagagcccgcgtgctggtgggtgcatggggtgagttctctcccattccccctcctggtgaagaaagcggaggtgctgcggtcacccaggcctcctctaatgcctctccccctccacacacacacacacacacacacacacacacacacacacacacacatacacacacacacacacacactggttccttatctacttgcaggtgctgccctgggctgatgcctgtgtcacctcctcaactgacatctcctttctccccattaacagaagccagacctcatccagccaggggccaatggcgcaacctccagcactgggctgtcctctgcagcagcctcttaccacacattcacacttaaacaaatggaaatgacctttagtaagaattccactcctccatcaaatgagccacattctgggtgctcaatggccacctgtggctggtggctgtcatttggacagcacagatctggaacattcccatcaacacagagagttctgttgcacagctcagctctggaggatgaatcctgactgggccaaaccagtcagggaatcccactccccatggcaattcgggggtctgtggctgcctcctgatgtacttctgaacaacaatgaaacataagggaaggctgggagagatggacctcctggtataaagagatagacgtgagaggagcagactcttaacacattggctggcccccttgcctccagcctttgaaggctgtgagatgatgcaatgactggagctgaggcagccatcttgcaactatgaggcaaaaagcctaagaacaaaaaccaacacacacaggatggaaggaacctggagctccaccaagctatggaactaactgcctctgcagttttctttctatgaatccaatgtctttattactcagccactgtagttgaggaattctgtcacctgctgctgaatactctctgataaaactacaaaccaatacccacatttggctcttaggcctataggtgaacttttccctcttagtgaaattctccccttctcatttctgttcagtctatccatgtgttagggcccagatcaaaggctgcctcccccaggaagccttccttgaacatctcccacaaatctggaagcgatcactccctcctctgccttagaattggtctctgtcttccaacccgcagcaccagtgagggcagggtttacacctgtcttcacggagagtgccccaggcccttagaaacatgcacaccaagtaacaggggctcaattaatatttggtgaataaaagaatagctttatttcagcctcctcaccatgccctgtacaatagggtttatacaaaagcttgtgaaatggagcaagtttctcatggctctcagaagtggggaaatcaaagtagaccacctgccgagacctcacaccacacacccatgtacctttctggacaattgaggagtcaaatggagatgcaaggaggaaaattttaattctatgcaaagcccattgacagatgaatgaataagatgtggttgatacccacggtggaataagattcagccttaaaaaggaagaacactctgatatgtgctgccatatggtgaaccttgaggacattacgctaaggcatgaaaggacaaacatgactccacctatatgaggtcctcaacttgtcaaattcagagagacagagagtagaatggtggttgcccggggatgggggagagatgagaagttgtttaatgaggacagagtttcagttttgcaagatggaaagaattctggagatggatggtggtgatgactgcatgcacaacaatgtgaacgcacttaatgccgctgaactgtgcacttaaaaatggttaagatggtagattttatattatgtgtatcttaccacaattaaaaatttgcttaaatgctatgtggaactgtgatattgttaaatatacatttggtcttcttcccttttcctggcatcccttcaggcatagaactcctgaaatccttggaatctccaaagtgatgtcttcttgcatgtgaatgattcactgagggctggcagcacctaagtagcttcaggatagggctggtcagaggaaagaccaaggcaggatcagtcctgggaagaggagagagaactgacggttaagttgatcaccagtgacatcgcaatcatatcatattacaatcaatcgtatctccataatgaagcctccgtaacaacataaagggacagattcagggggctgaacacatgaaggttcctagagggtggtgcttcccagggagggcatggaagttccacaccccttccccataacttaccctatgcatcccttcagctgtctcctttgacgtatctcttgtgataaaccagtaaatataagtaagtgtctccctaagttccatgagccactccagcaagttaaacccaaggatgtggccatgggaaccccaatttcaagctagttggccagaagcagaggtgaaacaacctggggcttttgattgacattggaagttggggagcagtcttggggactgagcccttgctaccacactggactggggtctgcttgccaagtgcagtaaagccaaacatccacactgaggttttgcagcaggagaagagagggcatttatttgcagggcaccaagcaaggagaatggggacagctcatacttgagacccaacctccccagtggcttacaaacaaggcctcttaaagacaggggtacatttcaggaaagcagaagttacaagtacaatcataaatcaatatacaggggctacacattggtttggcctaaaaacgtgggatgtcttgaagtgggtgcacttctgggtcataggtagattcaaagactctctgatttgccattgattaaggaatctagactttgtctaaaaccttggggtcagcagaaaggaatgttaaggtctggcctgtggatgtggcttctttcaggcccctcaggaagaaatgtagatcaaagaacagcaagaggtcagagttcagtgctcagctccccgttctctggagtctatgtgccagcagactccatgtggtgggggtccaggtttttgaaaagctcagggtcggtggccggttagctcagttggttagagtgtggtgctgaaaaacaactcagggacatacgtgaagatcttatcttcagtttctatagggaaccaaacatctgactctaacttccttggctattgttttatgttactattaccttcttgcttatcaagctgctcatttacttctcaggcctagctgggtacctggaagttcccctgaaaggactcaagattttcctttatctccttgtgtggggtagggtggcagtgctggtgtccccttaagagggaggggtctctgctgtgtctcctcctcagcctgtggtccgatgttgtcttcagatcgatggtgtcagaacccagctggtgtctgctgcagaagtgcttgcttgctggtggggaacaatccccctacatttggtcagtgttctgtgttgattgttgagtgataggatagaaaaagcactttggtttgggtttttctatacccacagagaaagatacatattcaaagagtttgtaaaatgacgggatacagtttagaccagaatgactccaataggcccaccacccgcctgaagacacagcattccagtcccgtggaggccccgagtgtccccacccagcttcatctccctctcctctcaaaaaaactcccttgctttttacagttctgaaggtgtattcttaaacaatatacagttcaattttacttggttttaacctctacataaatgtaacagagaaaacactaaatctcttctgtggcttcctcttctgcctgggtatcttggggtgagcatttttattattatctgttaaacttgcatgtgtgccatgttctctttggcgtgtctcatacacttaacagttacaaataaatacatacagtgccaaatgtaaagttcaaagtcttaaaaaaaataaagcagtttaggccaggcgcggtggcttatgcctgtaatcccagcactttgggaggccgaggcgggtggatcacgaggtcaggagatcgagaccatcctgactaacacggtgaaaccccgcctctactaaaaatacaaaaaattagctgggtgcggtggcgggtgcctgtagtcccagcaacttcacaggctgaggcaggagaatggcgtgaacccgggaggcagagcttgcagtgagccgacatcgtgccactgcactccagcctgggcgacagagcgagaccccatctcaaaataataaataaataaataaataaataaataaataaataaataaataacataaagcagtttaagtgactgttttcagctcttcagatgaggaagccctgtccaggcatatcaccaaagagaagctgcaaaataatagactgacacgtttgatgacaaaatagtttaaaaagcctgtggattaaaaacacctgaagcagagtaggatgggcaaaacaaaaactgtgaaaataaggccctggaaagatgaatatccttactacgtgacgaggccctttccaaatcagacaggaaaggggtgacaagcccctcactctggttctaatggaagttggttcaacagtttaagagggcattgtatatcaaaaggtgaaaaaaaagctcaccctttaacctagtaaccacatttttaggaattttgcttcaggaaacagcccgagatgtgcactaaaattcctttacaagatgcccttcacagtcacacctcaaaccagggaacaaaatggaagtgacctaaatgtgaaacagtacggcatggtttaaactatcaaaactattgaaatcatgttgcaaaaaaaatctttccggcctggagcggtggctcatgcctataatcccagcattttgggaggccgaggcaggcggatcacaaggtcaggagattgagaccatcccggctaacatggtgaaaccccgtctctactaaaaatacaaaaaattagctgggcgtggtggcgggcgcctgtagtcccagctactggggaggctgaggcaggagaatggctgaacccaggaggcggaggttgcagtgagccgagattgcgccactgcactccagcctgggtgacagagcgagactccgtctcaaagaaaaaagaaaaaaaggaaaaaaatgtctttccttaagttgcgaaataatgatgttgtcgtagcttcctgaagaagaaggtggtactcctatagattgctgattagaataaaacatggtacagccactctggaaaacattttggcagcctttcctaaagtcgaatctacatttatcacagaacccagaaattctattctcagctatttacccaagagaaatgaaaacatgtgatcacacaaaacctgtacacaaatgttcatagcgtcttaattcacaatagcccaaaactggaaacaacccaagcgtccctcaactgctgaatgggcaataaacaaaccatggcacatccataccatgaaatacgactcagcaataaaaaggaatggacttttggctcaatctcaaaagcattatgttccatttatacggcattctgtaaaaggtaaaactctagtgacagaaaacaaatccatgtttagtgagggggtgggaggggtggggtgggaatggaagtcaaccgcaaatgtgcaggtgaggtctctgggttgtgaaggaagggtcctaggcaggggttacacagctgtctccatttatcaaactgacacttctagttggtgaattttaaagtctataaattatgcctcaattaagctgattctttaacagttttttaaagcatgttataaaataacatggttgggctgggcacagtggctcacgcctgtaatcccagcactttgggaggccgaggtaggtggatcacttgaggtcaggagttcaagaccaggctggccaacatggtgaaaccccgtctctactaaaaatacaaaaattagccagacatggtggcaggtgcctgtaatcccagctaatggggaggctgaggcagaagaatcgcttgaacccgggaggtggaggttgcagtgagctgagatggcgccattgcactgcagcctaggggacaagagtgagacttcatctcaaaaataaataaaataaaataaaataaaataaaataacatgattggtagggtctcaattttgtgtaaaacagaagtatacacctgtgttagtcaggacagattaagacaagctgtggcaacaaaacccctcaatcttgacggcttaagcaaactaaggttcatttcctcatcatgtcccagtctaagataaattgggtaatgtctaaggcagctctgctccacacagtggtgctggcatccaagcagcatccatcctgcggttctagcctctcaacacgtgacttccacagttactgccaacaagagaggaggatgtgagaaggtcccaactcttaactgtctccactgcggttggtgcaggtccctgctgcgtctgccatctgccaggatgagtcgtgtggcctcaactcaacaggcagggaggctgggaaaggaaggagaccatggatatgtggcaaatgctggttgtctctgccgtaatatttccttacagtcccagataactgttgctccatttttcctatacagagaacacacccctcttccctaaggggaagaaatctgtcccacccagcactgcctccagctcagggtgatgtgcaggtctatgtctgtgagggtcctcttgtccagggccttctcgactaaaatgataagttacttacccttctccacaccccccagtatactccggtggataccacgggcatccttcgcacctagagcctgtgcagacatgtcaagattcatagtgactttgagagccccgggccccttattctgccttttggggtgttctctttctgcctgtttcctttttcttcttatccctatctggggtgagagttccctctttctcagtccactgcctgtctcctagaagggcaaaggtcctaatgtcatttaatccctttttaagtttcaagtcatcaaaggcttttgtaagccaggcatgggattttcctggaatcacattccctttaaacatctagtaggattctgatctagttgcctccagtctgttctgtgtgccttatagggatgatggaggatcaaggctccctctaccttagatgccactgtgtctttggagatcaccacagcagtaacagaaaaagagggaggaggcacaccaggtcttaattgcttccaactggaagtgacagtcattgctgagactgggaggtcttgctacacgccccactcatggtgattacaaggggttcatagaaaggtcagaggggccggaatagtgctaataaattaaaactcccttccagggcagggtccacactgagaactggctaagagtaggcagggtatggtggctcacgcctgtaatcccagaactttgggaggccaaggtggccagattgcttgagctcaggagttcgagaccagcatggcaaaaccttgtctctacagaaaacacaaaaattaactgggcatggtggcacacacctgtaatcccagctatttgggaggctgatgcaggaggatcacttgagcccaggaggtcaaggctgcagtgagctgtgatcatgccactgcattcaagcctgggcgacagagtgagacactgtcaaaaaaaaaaaaaaagaaaaagaacaggctgagagtagaatctaaaatgggcagaacagagacaacaagaaccaaaaactagaaatgaaagaaagaaagagcaagagagggagggagggaggaagggagaaaaggtttaggtaggaaggaaaaggggtataaaataaagtacaagatcctattttttaacacttcacaaaagcaacagaagaggaaactatagagccgtgaagttagaaaagtggctctgacccaccctcttcttcagagtttagaaaactcatttcattaaaaaatgagcaacacaaaatgattgtggttaaaccccatacaaaattattgtaagaaaaatgagaatgttgaatgatgcccccacagataatgaaggcattccagaaacacatgccccaaaatacatgccccaaagtgtagaaactcatttaaaaatgagccaacagaagttaagaaagtaacaaaagttataaaagaataacaaaatttggaagacttcaggaaagatgtgctagaactgaagaaataattagaaataaaagaaaaaccctatttcagaatgacgactaaactagaaggaacacaagaccaaatgaacacaaagaagataaaatgatgaacatttctaaaacaaaaaatggaagacagagaactaggattgagagaaagtgagtatgtagatgacaggcaaatgatctaacatatgtataatagtagctgctgaaaaagaaaaccaaagctagataatcaaagaaagagtaaacactacaatttaaaaacactttcctgagatagataaaaacttgaaacaacattgtgtacctaaaaaaaagtgacccggcacatccaacagagaatcatattctatgacatattctatggatgccattgagaatctgggaaaagatcaagtcactcttagacaagacggcatgacaaaaggaaaaaagagaaagaaaaagattaagtcacttatcaggaaaatcagactgtcatcagacttacctacatcaatacttcatgccagaagacaagggactagtatgcccacattattaaaggggtaaagtacaatccaagaaagatatgtctccagccaaactgatgttcaagtataagggtcataaacaattatcaacatgcaagaactccaagagtattattcctgggagcacctactgaggaccctattagaaaacaagcatcaggcaaccaaagtgactagagaaacataaacataagatctgatggtgagtattcaacatatacagcatatacttacttgtacgattaggagtaaacaatggttgtaaggaataaagtatagctgttacagtacaattatgagatatttgagggaaaatgggaagagcatatgaaaagtagaataagcttgttgactgccttatagttaataactaggagtaaaaggatattaattcaaatcaggtgctgtgggaaaggaaagggaagaggatactagcacatttcaatattgttcatagtaggaagccaacagacaaaaaagagggaactgaaagcattatgtgcagatattagtataaaggtaatcatttcagcaaaaatatgacccttccttagtaccaaaaaaaaaacaataagagatagagaaaaataaaagccacactgaaaaacaatttgtttaaaagatttacgtaagtataaatgtaacataaaacaatatgacagaactgaggttaaacgtactgattatatggtcttaattcacctattagcagaaaaaagatttctatattggctaacaaaacaaaattcaaacctgtcctttaaaatttctctggaggctgagatggaggctcacacctgtaatcccagcgctttggggggccaaggcaggaggattgcttgagcccaggagtttgagaccagcctgggcaacataggaaagctctatataaaaaaaaaaaaattagcccagtgcaatggtgcacacctgtggtcccagctactcaggaggctcaggagggattgtttgagcccagggggttgaggctgcagtaagctatgatcacactactatactccagcctgggtgacagagtaagaccttgtctcagataaaaaataaataaaataagataaaataaaatctctctggagtgatggccagaacatattgtctagtgaaaagtgtgaggtagggaagtgactctaatatgctaccatttatctaatacagagacaggacacacacatatatgaaccagcttatattaaaaatggaaaaggaagggtgttctaattacctgaagcagcataacaaactacctttttggtgggtctgaacaatcattttattgcataaatgattatttgggtcaggattattattcaggcaggactggctgggtggtttttctttcccacgcagcgttgatggagatcactcactgacatccagatagaagatgggctgatctggaggctccatgatggcttcactcacacagcagtgtttggtgggacatctggaaggctgggctcagcggatggacccaggtgcctacacgcggcctctccaaaaaggggtcttggagtgactggacttcttcacgtgatggctcagggggctccaagcatgaatgccccaggtgagctgggtggaggctctaaggcattttacaacccacctcagaagtctctgagcatcatttctgccacactgttagctaaagcagtcacaaatcctccagatgcaagcagagggacatagaccacatctcttaatgggatgactatccaaggatttgtggccatgttttacaaatgccatgaaggataaactgtatattgcgtataatggttacatatggggaagagtggggacagggtggggcagaaaggaatagaagttaggcttctctgaatataattcattctgtagatctgattttagaaaaatgtgagtatgtcatataattataaaagttttacaaatcccctgaacattgaaagcaaaagggaacaaatgaacctctgtatacatttttttttttgagacagagtcttgctctgtcacccaggctggagtacagtggcaccatctcagctcactgcaacctccacctcctaggttcaagcaattcttctgcctcagtctcctgaatagctgggactacaggcatgagctaccacgcccggctaatttttgtatttttggtagagacggggtgtcaccatattggccaagttggtctcgaactcctgacctcatgatccgtctgcctcagcctcccaaagggctgggattacaggtgtgagccaccgtgcccggcctgtgtatacacgttttacaaccacattgagaggaagtattccaaggaactttaaaataccataatttgactattcatttctagtgcaatatgccctaaagacaaaaagaaaaaatcattttaaactgtttcaatcattgcattatgctgatgatggtgctggtattattctgatatcattgtgtgtgtacggtggcttcatgcaaatggttttcttactgtattaatgtgtgtcattcagaaccagattctttcctagagaaaatgaatacaaataaatgacagaagttaagtgaaagccctgcggtcctaaatttgaataggaagtatcattatgatttaatgatgtagaaatactgaccacagcctgggcgtggtggctcaatcctgtaatcccaacactttgagagaccgaggtgggcagatcacttgaggtcaggaattcaagaccagccaggccaacatggtaaaactccatctctactaacaaaacaaaacttagccaggtgtggtactgcacacctgtaatcccagctactcgggaggttgaggccagagaatcgttggaacccgagaggcagaggttgcagtaagcagagattgtgccactgcgctccaacctggacaacagagggagactgtctcaaaaaagaagaagaggaagaggaggacgaggaagtactgaccacagcagtactgtgcacccctggtacccaagttgtgttttttttaaattctattttccttttttatattttgttttacatgctattttgacaaaggttgtggagccatttctcactaaaaggaactagggctcctgggagaaatggctgactccaggtctagagcagtaaatgcacacaataaacctgcagcatcttgccaaaccagagagcaagtacattctcaaagaccaatggggtcatgtccaaagttctcaagagccagcttgaaagatgggacaatttgaacttcaataagggcaattaatgcaatcaattaaaacacagaaaatgtctttgaactcacaagtttgtacttatttttttatccctacttgatcaccgttggaagaacaatttaatttagaaaactgttagaggaaccagatcaagcatatatcactttataaactgtaccaccaggtagccaaatagcagaagttttgttgaggggaagtttctctctatagaaacatttcagcgaatacatgaaggaatgacagaatatcaccgttatgcaaccactaatttgctttaaatttatttgcaaccactaataaattaatgagtccaggcactgagcatcagcagctgctaataccacaaagagaggacagaacactgcctcccaacagaagagcacagaactctgcaccaagtgttcttgccaaaaaaaaaaaaaaaaaaaaaaagtaccaacctgatctggtcaagtcactagaccagctaccgatttactggaaatacagactatgggaaactctacaatctaacaacccagtttcttcaataaataaattatgaggaagaaaacagggaggggcaaccactaaatgaaagacaccaaggcaatccatcagccagtcgagacgcggggtcttattcagatatcaaatcaaaccattcttttgttaattctattatttatgagacatttggaaatttgaacagagactggatggttgctgatattaagggatggttgttacttgtgcaaatactaaagactgttattatcattttttaagatcctaatcatccagagctatgctctgaaatatttgtgaattaaattatattgtgtctgggatgaatgggatgaatgtttagataatttgggaggggaagtagctgagggtagagatgagacaggactgtgtgtgggcatcactgctgcagctggtgctggcttcctgaaggttccttatgtgactctctgtttctgtgtatgtcttaacttttcataataaaaggctcgtgtatgtaaatgttcacacaataaaaaatttatatttagaaaaaaggctagaaggatataaatcaacatgctagcagacgggattataggtaaaaatactttttaaattgcttagtatcttcaacagtactttaaaaatctgggaaagagatgaaaccaaactatcccacccttccccgaggaaggttttgcctgtgatctgcaggtggtcgggtacattggcaccactggaccaggcagatatttggctgtaccaaccaggcccttacaggcaaatgcacttcccctacccgacttctcttctgggaatcatgcccgaggaaatcatctcaaatctgaaatgccaacaaagctgcctgcgcaaggtgtccacatcggggctatttactggagtggacgctggagtcagaggccgcgtccagggcggggagtgtctcgggaaagccacggaaaacggtaaccacggggcagaaggccgcagactatgctggggcgccagggatgcgcatctgcacatgtgacacattcgttttgcaaacacgtgtgggaaatggacggaagccagttatcagcctccagggacaccccgctaatatttaaaatggaaacgcccctaacccctcctgggggaagctggctttctcaaactgccccggaagttcccaggaggcctagggtccctcaccccactgctgccatgttccgtgtcgttacactcgcgacctagctttgtcgttttctacttgtccctgcccgcctggagggctccgtttacacccgctccttttcccacctccgacgcccctcccaggctgctgcctgtgtccactttccctgaagatggaagaaggtcggatttccctaggagggtcctcataggacctgcctggccactccttgccccaggacgccctgggccgggcacctccagaaacatcttcccgcatccccggcaagagctccctttccacagacacagaatcctctgcatattttcttacacgaagaccattctttctaaaagaatcttgtccccgctttaaagtttgtgctccctccctgcagacggaatgacagcccccacctctattcccctcccacagccgtggaccccactgtcccgggagagactggctcccttatgaagactacatttcccaacctcctttgcggccacggctggccatgtgacccaatactgccaatggggtgcgagcggcgcgagatagtggatgaacccacacccggcagggcagaaaagggagggaacccagcccgccgtcgccaccgtgaaccactgactgctacaggagcgaataatcgtctaccttgtttaaaccatcattaacttgggttttggtgtttgtttgtttgtttgtttttcgagacggagtctcgctgggtcgcccagactggaggcagtggcgcgatctggactcactgcaacctccgcctccgggttcaagctattctccctgcctcagcctcccgagtagctgggattacaggcgccggccaccacgcttggctaatttttgtattttttagtagagacggggtttcgtcatgttggccaggctggtctcgaactcctgacctcaagtgatccgcccacctcagcctcccaaagtgctgggattacaggcgtgaaacactgcgcccggccggttttgttttttaataagtaaccgagcctgcattctaaccaataaactcattctattaaaacccgcctatggtgcccagggccagcaggttgtctcttgtcaggttctcccagaagccaagcctgagagcaggattcaggtgcaaatgtttccctagggagtttctcccagctgaaaccagtgagggagccagggaaaaagaaggagaagacaagcaagggtttcttcaatttccatccctgccgtggcctgagcccaagggagctctgcagcacaaattatgcccctgagtttgtcctgtcttaaggcaaagggctaggctttcctgctgcatacttccctgaagcaggtttgagatgcaagggttagcagcacagcacagagcaggcggggagctggcttgtcccagtaaggaggtctgtaggctctggtcaaggcaccaacattactctatgcccaggagtgccagactcttcgcagcagctttccaggccctctgtgatttccacaactgtcaacctcccccacccacctcagcccacctcctcacaccttggcctaacaagatgaatgagtgacagccccacaaacacttccccaggaccttcaaccgggagtgcaatacccccaccccagcagccttcgtccccaggacctccaaccaggcacactaacgcccaggccttcatcctctgcctctcggagatttctggcagacaccacaagacctgggataggactgcttagcaaagcatgctggcatttgcccagagagggtgtcaggtcccagccatgggactgagaacgtggagaagcagagaggtgtagtgacttgcccagggccacacagctaacaggagggagaagctgagatggtgaggagaggagaaagcagtgccacagagaagtctaaaggtgcgagagaagctgggggaagtaggcctcagactctgcgggaaaccaccagcgctggtgtggagggcgtggtccagtgggtcagcaaggatccctgtaacatcaggcgtcatttgccgagcacttcgtcatcaggtcctgttctccccaccatgattctcagaggcgctgtctccttgggttctcccagtacactctcagacactgagaagctttggactcaagtaaatcctaggaaatacccatagggaagtggagaagtgagacagggaagagccaaccaaggccatgtcatcaacagagctaccgctgggtgcaactggagctccatcccttggagatggtgcaggatatacacttccaggtctcctctcttggctggatggatgctcctgaggaacaccagcctcagctggctggctttgcactcacacaagcaaccttgacccctccgctccacttcacagcaaccaaaccgtgagggacgtggtgactcgctgaaagtcatccacagacagaagggaccaagtgggccccaagagggggtctgggtatctggccaggctctgccctagctccaatcagggctccaggactccaagatggcaggtctgtgcccacttacaagcacagcctgtgaaatctcagagtcccaggacagatgcctccagcctcctagcccaaggtttaagggcaagcccagctctgccatggatgtgcatcctgagggaccccacggggacagattgtagttgaaggcgactataggaagcaaaataaatttgggtttggcccaagaggaggcagtggaggcagggaccagggggacagcattattcatggagtacctactgtgtgccagcctgttccatgctgcagggttctgttgaaaccacctgcaatcctgccagatcctgccccaatttgcagatgaggaaactgagtctctgagaggtgcagtgacatcttcaaggtcatacaacctggggtgaaagtgtcaaattcaaggttgtctgacccaaggactggggacagtgggggctgaagaggcacggagtagggctctgagggcaaacaggtgtgatgttgctgctgctgttgttcttaatgcaatcagatgatatctctccccggctcacagccctccagtgacttttcccctgaatatgaagttcagcctctctgccatggcctgcagggcctgtgccatctgtccttcaaccccttggtctcttgggtggcatgaaatccctgcctgccccaggggcttttaaattcaaatgtaaaaaatttaattaattaaatgtaatcatttaatggtaattaagcttaactagtttaaatgacttttctaattaacttagagttcactgcttctccttagggagtgatcatggggtgatgctggaagaatggggggagcacggctttccacgaaggtgagtgcctcctccctgcctgacaccctggctgagcaggtccaggtctgtctgagccctggtacagctctggttctagaacacaacgtggcacatagaaggtgctcagataaagtgtgccatgggccaagccctgtggagaacaacccagaggggtcaagcctgctgtcaagttcatgctgtgcctccttttccttggatgttgtgggaatagggagctatggagggtttgggaggcagacaaggaaagaatttcctaggctagttcacagagcaactcccccatccgcaaccagagcttgcagctgctgctgcctccccaggcctccccagctcaagtccccaataaggctggcccagaacaggaatagagcagcccatggcttctgcgaggacagagggggtggctgcagctaaacctggcttggcaggtggctcactggggctgggcagagcctcagctgggggtagggactaggggcaggacacctgggtttctgggcttccctggctctgcctcactctctggtggcctcaggacgggtcagagcctcgctgagcctctgtaacctccaggagaagccagctgccgtgggcgtgaagatacacaagctctgataaacatagtacagccaatgtatatatagaccctcccacctggtttccaaaaggatttgcaacagctttcacaagaggcgaagaaatgagcattgagagtgagccagggtttacacatgggcccctcacgtcacaggcctggggaactagaacagggacaagaagatggagcccagatccctccaggaatcgcgtctgtatgggagtgagctccccatcagggcaggtatgcaagcagaggccagcagtccttggtggggatgtggtcaaggggattggtgcatcagggagaggtgtggtcagatgcgaagcccctgttggaagatgaggtgactggtactgcctgcccaccacagcccctgcccacagggaaaccaggatgagataatgctggtgttgggggcctgtattcatctgtttcattgttgctataacaaaataccactaactggatgatttcttcttctttattctttttttaaatcgagacagggtctcaatctgtcacccaggctggagtgcagtggcaatcaccgctcattgcagcctcgaactcctgggctcaagcaatcctcccacttcagctcctggaggagctgggactacagacatgcaccaccacacctggcttttttgtacaggtgaggtgttgctatgttgccccagctggtctccagctcctggcctcaagcgatccgcccgccctagcctcccaaaatgctgggattacaagtgtgagccatgtgcccagcccagactgggtactttctaaacaacagaaatttctcagggttctggaggctgggaaatcaagatccaggccggcatctgacaaggcctccctgctgtgtcctcccatggcagaaggaaggccgaaaggcaagagagtgctggagggagcagtggagggcaaaacacccttttattacaaccaaaccgctcagtaactaacccactgggagatggctggcagcattcatccattcaggagggcgggcccccaggacttaatcctgctgtgaggccccacctcccaacacagcagcttgggggacacattcaatccttctggcccctgtccattccctgggggaagagggacttgaccacagtttcggggctgctggggcctgagctgccaggtgggcagcacgggcctcctagggctctgccctcagaagcagagctcggccccgagggagggcatgggaacgggagcgcagccgggacgctaacccccggcacgggtgctgcctgctgtttgacttggagctcctggcttcccttctctgaggtgcagagtcctcagccagcacaacgcgcctatcggctcagtatcggctcgctcctggaaagccttcccagagcagacccccggaataaacggaatggcagcactgtccccagaccacctcccgcacagccctgctgcctgctgcctgcgctgggccttgcggcagccttcctgcacctgccctgtctcctgtgagcaaggccggctcctcctggtcttgcgggggaggcggccagtgggcaagaatgaaaatgaataaatgtaaagaaagtgcggcaggacaagtgtggtcagggaggcatctgagcagacccctaagcgggagcacatccggggaagagcgttccgagaggagaactagacagctcctgcagaggccctgcaccgccaggctcggggtgaagcacagggagccaggcacagggtacaggggagggcgcccggggtggggcactgtggaccatgaggaggcccccaccgaagacgggagctgcagcagggatctggaggagaggcttcccgccctggcctctagaagggaattcgccaaatcctccctccgcagcctccctgctcctgagcaggcctgtctgctgcatttttcttttctttttctttctctttctttctttctttttttttttttttgagacggagtgtcactctgccccccaggctggagtgtagcacctcgatctcagctcactgcaacctctgcctcccaggttcaagcgattctcttgcctcagcctcccagatagcttggattacagacgtgcgccaccatgcccgtctaatttttgcatttttttaagtagagacgcagtttcgccatcttggccaggctggtctcgaactcccgacctcaggtgatccacctacctcggcctcccaaagtgctgggattacaggcgtgagccaacacgcccggcctgtctgctgcagttttaatgctgcctgatgaggaggctctcacggctgtaattgaacaaagtctacatgcctctgccatctcccagtccagagactcattaatcccgggcttggaagaggcgcctgcccggaccctgctgcctgacaggaaatgcgggcgtccggcctcgggggaggggggacctggccgctccccatccccattcccccacctcagggacagggaacaggggagaggggccctgccgcttgagacctccacgggtagtataaactgtcaagtgcctgggctttgtaaatgttagtgacctgcgcactggcttccgcactctgatggctggacacgctctgtaaaagccaaagggtcccataaatggcaagggaactgcaaacgactggggctgcagtcgtgcgcggagaagcctgctctctgtgaagggctgcggcatccagccaggcttgcggcgtccagccaggcctgcgagccgcgaggggcgcggtgggctgcggggcgctgggtaacttcaggggcgcgcacggtaaatctctaggcgttgggtctgctgctgtctgcaggctgcagagtccccggaagccccgagggccgggccagggggtgcacacgggcaggacagccgcagaggccgagaactgggctgacgcgtggcaagcccgcggcctccagctgcgccgaggacgcacgaggacgcggacgggcgctcggggccgggcggggctccaggacacgcggttgaagccgagctctaccgccccctggcggctacaggagacagagcctggggccgcgccccggcaagggattcattccctccctccccccttccctccctccctcattcattctttcatgtgttcattcagcagaagccgagcgctccctcggtgtcggcagcattctcagcgctgacgacacaacagtgacaagtcaggtctcggccaggataacccaggataataagctagattggctgggcctagtgggcggaggctatttgagccagagtggtcctggaagacctcgctgaggaggtgacatgggagaccgggatggggttggggggagccagccacaggaagacgggggagggggtgttctacgcagaggagacagccagtgcaaaggccctggggtgaaaacaagtcttcatgattgaaagatggagagagggagacaacagctcccaggaactgttcgcccctgtgccagggaagggttagtgggcagagacctgtcccagactggggctggaggacaggaggagtgcagagacagaccccatggggaccctcctcctgggaacacaccctaagcttcctcagaggaccacagagaccctgctctcagaccttgagctgtagtgggcggagtcccctcatgcctgacctgacctgagctgtcacacccaccctcctggcctggggatgaattcgactccttcccagctggtaagagccagtcctgggacttcaggagtaccctgggcacggtgtgccgagctcttggagtccctgggtcctgactggtccccatgagggggtgaacctgagacggatgaacagccaaggtggatgcaagtccttcaggccatcagctgaacttcaaacccaacggtacctgaagctgagcacacccggcttacgtgagcaaattccctgctgccccagccatgctgccagcatcacagggccagactgcagggcgccttcatcaggctgcccctactcccctcggagccttctccggagcccaccacctgtccccaagtctgtttttctgtcttataagctgtgtggctttgggtaagtgatgtcagctctctgggtctgttttcctatctgtaaagtggaggtcacgtaacctccatgaggtcaccgtgtccagcccaggcaaagtgtgcagggtgcttgctactctgtgcacctggctgtcatcactactccaggacagtgggatgggtggccgccaccagcagactggatctgtgtgttcgctgctctgtccagtgtcagtacagggcctgatgcctggatgatcacaggatgttacctcatcacagccctctgggggcctctgtgtcctcagatgtagaagggcctggtgggtcagcagtcctccctcccctgagcatgacaccctgcccctggcccagagacaagggtccctcaaggggccacaaccttccccaagtaggaggggagctcacaggtgtcatacacaatctcccacaacctttagtccttttttttttttttaattaaaacagcaaccaggtaactgccacaacccatcagggaaaggacccgggatgggcagttgttttttcaaaaaaatatattttctttttttaaaaacaacaccaaaggaaacccatagcccctgtcaagccagtcctcaggggagagtgagctggaaggctccccctgcacttctctgagcagagaacttgggcccctcccactggaccccagcctgagcagagggcaaggctctgcctgctggtaccctaggggatgggggagaagcgatcagctccaaaccatgcaagaaaaacaagccaaacccataaagcaaaagaaaaaatcaacagaggataaattaaaaaaaaaccgaaaaggtgaatgacaccgataacggtggcgggcaggactgggtgagccagtgtgccccgcagaggccctgtttgccagtgccaagggaaggccttgggtggctcatggcatctccctcatgggagtcttgaggtattcacacaactcatcccctcttgtgtaccccgcaccaaagccgggatagaggtgtggccaccctgggccaaagtgtgcaaagtccattcagtcgagagattaaaaaaatatacaacttggatggcatccaggctgggcaaggcggtggcccatccacccaggtatgggcggcccgctgtgcaggggcagcagcatccacagggggcattcaggccccctcagtccaggatctcagcagctggagacgggtccttggagcagcagggagaggtgctggtggggccgagaagggcctggctgggagccccgatggtctgcttctttggcacttgggacaaatggctcaccacagagccaggtgggagcagccccctcagttcctcccagatgccctgggccaggatggcagtagcttatggtgtgggtgagcactgcccccccagatggggatgtggggctctggagggccagagtggggtccaaggcccggcccctatgagtcttctcccaggatctccttcatgaaggcagcaatgtccgtcttcttggttttgtgcaaggtgaagaaggggtgctcctgggggtgacagaaggcacagtcaccatggaggggtagcgggagggggaggtggccattcctccccaaccagctccagcccaagtgttctcctgactggcaaaatcctactcatccttctaggacctccacccccaggaggccctccatgactgtcacagatggcatttgtggctcctcctcagctctcttgtggtcactctccagccacactaacctcgctttccccccacacgtcaggcctctgcccatgctggaccttctgcttgggacagcctctccatcaggagataacccttattcatccttccaggctcagttcaaatggtacctcctccatgaagccttccctgatgccacccttggcccctctgccccattctgtcacacactgcctgtgtacccttcccagggcctggcatgcaggaaggagggaaggagccatgtatgcaggagcaaacaaatgaccgagcacctaaaggagagaacacggggccagccagacgagctacccatctgtgtgcaggatgcagccctctccccagagccccacccagccccagctagccctgaagagcagggcaggcacctcccgcccatactcaccatgagctccaggtagctcatacgctctgcggggttcttcctcaggctaggagagaatagtacagctgtggccaggctggcagggaggaaggaagcccagcccccaagggccagccaaaccaccccaggattgccccaggcctggcagcaggggacacgtgcacccatggaagaagggacaggactgtccagagcttcttccagggtggaggggcattcataggagcaaactagagacttgcagtgagtttctctggctcttggggtcctggttttcttgtctgcatagtgacctaggaatttccatatcaacaccaaaatggggtgcaatgctcttcctaacagtcacacacttggtatcctcaatcaggagagaaactccttatcatgggttctgggagaggttagtccacaattaaaggggtcagactgcccagggactctgctgggctcctctgttgctgattatggtcaacaataaaagtgcggggaccatgggtgtgagccaccgcacccggccgcttcttccttacccaattcttgctctatttaattatggtcagagaagttgccctcttccttatttcttctgtaacctcaaacatgattttttttttttgagacagtctcactctgtcgcccatgctagagtgcaatggcatgatctcagctcaggctcactgcaacctctggctcccgggatcaagtgactctcctgcttcagcctcctgagtagctgggattacaggcatgcaccaccatgcccggctaattttcctatttttagtagagtcggggtttcaccatgttggtcaggctggtctcaaactcctgaccttgggatccgcctgcctcggcctcccaaagtgctgggattacaggcatgagccaccgcgcccggcctctcaaacatgatttttataaggctcctgtggggcattctttaatttggtacaaagttctagatatcagtaaaagcaaacttgttttttgtgttcaaattttccatatacttttttctctttttcagtctatctgatttgtccacttctggaagaactgtattaaaatctcccaccaagaccatcgttttgtcaaatgctcctcatgctccagctgtttctgccttacatatttggatgccaagtcctctgggggtttatttgctaaaggaataaaggaacagggcccaggaaggtgcagggacctggctagggaggggcagtggcaggcgctcagcagcacccaagactcaccactgagcagtgaagtccacaaactcgggggagaaatggtcagctgggagctggggtgacggctcctccaccacctgcttcagctgctggaacggggtcccccaggactcataagggaaccgcaggatggccatctcaatctgcagcagggacaggggggtcagaggccctggccccagatacaaccacgctctgcacccaggagcgagggttgggggctcccacccatcctggtaccagagccaggcgtcaaagctgcacagctgatctccctaccacatcccagcagaacaaaggtgagaaagccggggatgccagctcttagctcctctgacccagccagcaggacctagctcaggaagcagattcagcccacaccgggattggtgggaccatcatagggttttcagaaaacctgaattctgaagattttataaaacaatgcaggttccggctgctctggaaaaatctgaggagctggcaactgtgggccgccgcctcatgagccaggtgggcaggtcccaggtagtcacagccaatccccttcctaacatctgaccatctcagacttcagcatttgctgtcattaatttgggctgctgttttcacagaggaggcacatgggaaatgctacacacacacacacacacacacacacacacacacacacacagagctgtctccaaggccgcggacagagtgtgagatcatgaggctgcttcgcctcttcacccgtgagcctgcagcctcatcttctgcagggccccagcagtttccctcctagacaagtggcctgtgtggccacatgtgccctgctgcatccagatttcctgtgggtgacatcgggccggtgggtctctgtcctcgctccaagctcccagccctgtggttggcaggaagtcatcatggaagggacggactagctagcttacaaccaactctgggctccaatcatgatgactggatggaaaaaacaagtcatgtcagccctggccccggcctggaagaacagagaattctgaggctccagcacaagggccctcactgccggccgtcatcaccatgatgaacggaagagacctcagcacaaacacttggcgctggcaactggagcccagacaagaccctaaggactgtgccgagactgtgcctcccatcaggctagaggccctttccagctcagacaaacacacccacacaggcagggcccactgcgtgtgtgtgcatgtgtgcacgcgtgttcacaggacaaaactgtactgatttgggaggcttttctcttagaattttcactgactgcaatatgtagagcaagtaccccatacgagctacaagagaaggaccagctgccatgagagttataattagaaaagcagaagtgtccaaaccttcaacctcgtactcctttattttttctaaagagctcaaaaaatgaaaaacaacaaaaatagcctccgggcacgaagatgtgccatatggtgtcatctgccaggaaatattaagaaacagcctgaatgtccagcgccaggggccggccccaccatgggggcggagacccagccaggaccgtagtcgcacccctgtgactccccagcgacaacactaacaggccagcacccagtcagcacttgctcctggccaagggccatccccagcatgacccctgtctgttctgggtgattaccactggcatcctgaggcttgtgcagtgagtgggaaaaagccaacgccaagagagctctggggctcttgcaggatagggggaggccgagaccagagccccacccagggggactctcccgactctgtttcaccagtcactcccccaggatggctgagaatttgaaatggaaggaaaacatcaggaacaagggaaacatcccacatcagcagacagggtgactgaatggtggcagatggttatggagtctttggaagggatacacacaggagtctattataatttggagaaattagccaggtgcggtggctcacacctataatccaagcactttgggaggctgaggcaggcagatcacttgaggtcgggggttcgagaccagtctgaccaaaatggagaaaccccatctctgctaaaaatacaaaattagctggatgtggtggtgcacacctgtaatcccagctacttgggagattgagtgaggcaggagaatcacttgaacctaagaggcagaggttgtggtgagccgagattgcaccactgcactccagcctgggcaccaagagcaaaagtacatctaaaaaaaaaaccaaaacagagagagagataaatatgaacaacgtgtaatgctacaaaattttttaaaaagttttttaaaagaagcattacaaggccaggcgcagtagctcacacctgtaatcccagcactttggaagtccaaggtgggtgtatcacaagtttgagacctgcctggccaatatggtgaaaccccatctctactaaaaatacaaaaattagccgggcatggtggcgcatgcctgtagtcccagctactcgggagcctgaggcaggagaatcacttgaacctgggaggcggaggttgcagtaagccgagatcacaccaccgcactccagcatgggtgacagagcaaggctctgtttcaacaacaaaaaagagaagcattacatattgtttgtatttctctaaattataataaaatgtattatatagaatataataaaaatattatatatataatataatgcacaatgttggcactgaaatggggtaagaggtgtctctaggtagaataactacagtcattttccccttactttgcctctgtgtttttatgttaggtttccactacttttgtaacttgtgagagaaaaacctaacctgtgcctaaagtgaccacctccgcctccccctgtgtgtgcctgccgatcctccattaagccgggagcattccctgcccttgaacctgggctggcctgtgacttgctgaccaacacaatgaggcagaagtgatgctgtgccagttccaggcctagcacttcagagaacttcattttagatgccagccgtcatgaaagaactccaactctgctgacactgccatgctctgaagcccagggagcaggccaatgtgagtaagttgcatggagaggccaggcagaggaggcccatgtttgtgaggccatcttgggccttccagcccagcccagccatgaccccagccaatcccaggtacagcagaagagccatccagctgagcccagctacagtggtggaaacatgagaaataagaaaccgctgttggtttgggtcactaggttctggggtggtttgctatgcaatatttgataactgaaatatacacttagcacacacttgtccaagttccaccagccatatcagaaggccaacagccatggtggccccaacaatcatgatggatggacagatggaagggagacagggagatggggaagggacataagggtgtgtgtatgtgtgaggtagtcatgagcggggtctctaatatccaaccagttctgtgcagtctaaatacagcaagaacttgtcctttgcatcaaacttaagacttggaaaactgttattgcagatacagcacctgccttcaggctgaatattcctctccacctcaaaaaaaaatttaattgaaaaattacatgtcaccagttaaagaaaattgaaggtatggcccagtcccacctctctgacaaaattatttcgactttgagtctttcccagtcactgtctacagatacactgtttataaagttacagccacaggccaggcgcagtggctcaaggctgggcgtggtggttcacgcctgtaatcccaacactttgggagtctgaggcaggtggatcagctgaggtcaggagtttgagaccagcctggccaacatggcaaaaccctgtctctactaaaaatacaaaaattagccgggcatcgtggcagatgcctgtaatcctagctacttgagaggctgaggcaagagaattgcttgaacctgggagccggaggttgcagtgaactgagattgtgccattgcattctagcctggtcaacagagtgagactccctcaaaaaaaaaaaaaaaaaaggccaggcacagtggctcacccctgtaatcctagcactttgggaggcagaggcaggcagatcacctgaggtcaggagtttgagaccagcctggccaacatggtgaaaccccgtctcttctaaaaatacaaaaatttgccaggtatggtggctcacgcctataatcccagctactggggaggctgagacaggagaattgcctgaacacgagaggcagaggttgcagtgagctgagatcatgccattgcactccaggctagtcaacagagtgcaactccgtctcaaaaaaaaaaaaaaagatagccgggcatggtggcacgagcctgtaatcccagttactcaggaggctgagacaagagaatcacttgaacctaggaggcagaggttgcagtgagccgagatcatcccactgcactccagcctgggcaacagagtgagactccatctcaaaaaaataaaattaaaaataaataaagttataaccacatgatgatgataacgatggtagcagcaacaccagtaaaacccacaacacctgcgtcaactctctacccaccagacacttctcttcgctcgctcccaaccctccctccctctcctctgacccggccacccaggcacacagcaggcacagccccacctcagggcctttgcacttgcaccccctggtctaccctgccctcaggtcagcagggtgccctccttgcagaggcctctgcatctgcaacagtggccttccacctgtccccagagccacccccacctgctccacccttctccacccccgtggcataaaaaggaatttatttggtctttgttcctggcatggagctcctaaaacccttggaatttcctgagtgacaggagtggctttgttatccacaaggagcctgagtttatgctaatgaggtgactcagggtaaggcccctagacagcctcaggatggggctgctcctcagaaaacccagcttgattatagagggtgggaactctcatcatcacccgccaactgattctgagaggatgggggcctggagactctgctctataaaaactttcagtgcgtgcagtagcttgtgcctataatcccagcactttgggaggccgaggtaggcagactgcttgagcccaggatttcaagaccagcctgggcaacatagtgagaccccttctctacaaaacattaaaaaagtacctgggcatgggggcacacacctgtagttccagctactcaggagactgaggtagggggatggcttgagcctgggagttcaaggctgcaggagctgcgatgataccactgcactccagcctgagcaacagagtgagaccctctctcacaaaaaacctctccatgtgaggctgggcatggtggctcatgcctgtaatcacagcactttgggaggctgaggcagtcagatcacttgaggtcaggagttcaagactggcctggccaacatggcaaaaccccatctccactaaaaatacaaaaatcagctgggcatggtggtgcctgtaatcccagctactcgggaggctgaggcacaagaatcgcttgaacccaggaggcagaggttatggtgagctgagattgtgccactgcactccagcctgggtgacaaagtgagactctgtgtcaaaaacaaaattccatgagcttgagaagcctgtaggttggcaagcacagggaggtaccaggagggtgccaggccccgagagggcatggcagctctgcaccccacactcacacccctcccccgtgagtctcttccatctggttggccctgagttatatcctttctgataaaccagtaaacacaaataaagtgtttccctgagttttgtgagccattctaggaaattatcaaaccttaggagagggtcgtggggacccccaatttgtagctggtcagtccagtagcatgggagacccgctacttccaactggtgtgtgatgttgggggcagtctggtgggacagagcccttaacctgtggggtctgtgcgaactccaggtagcatcagaaccgaacagaactgcagggcactgggtgggtgtctggagaatccgagaatgggttgcggtgttggaaaacaccccgccagcgcttctcaccacatcttactgatttcatctgatggcctcatccccaacaccaaacagtcaaagggactagggacacgcaggaatgttctgggccaggcttccctgggcagggaaggagctgatgcccaggacactccattggtcccaagccactcaactggccaaggccaccagcctgagcccgacctgctgatggcatcgtccttccacgcgtctcctgcacagcttcctagccctggctgggggacacatcctggtggtcttcccatccctccaatccactgtccacaggggagccagagcgggctcacccacaccttgacctgagccccaacatggaaggcatggggttctgccaggcaactccggaagcaactgctctgggcccatccgtacacctggacttctgccacatctgccctcaccctacccaagccagggatgcctttggcttccgcaggcccaggattgagagcccgcccaccctttctaccaccccaccacaatgtaccaggacgccaccgacaacaaaccttctgctatgaaatatttttgaaaagatctttaccatcttgcttttgcatgatttacataccaggaacttacgtaatttgggattggctgtgatttctcaacaagcaccaagaactccagagaaagccctgtggccaccatatcacaaagcacccaggacttcacgatgagtgaccctgaccctaggaggttcccttaaatagatggtaatttctgatggcacattttcttctcagattttgaagccaatacttctttccagaacctaaactatttgatgagtcccccaaaagctcagggccccaggcacggctccacccaccccacctgaccaccaagggcaggccccggccccacacagtaccatggtgatgcccaggctccagacgtcagacttgacattgtagcccttctggttcagctctgggttgatcctctcaggctgcaggagggaagattgaggcgtgaacacctgccccaggtaagctcccatggctaggccttgcctcccaatccccaaactgagcgctcagcttagcccacctgcccatgtgacgggggaggaaactgaggctaggagggcctgggtcatgcttagaagtcccaacccttgcatcggtctgatgctacctgggagcaggcccctaaggccctcctgacaatgagggcggggcgggacctgcacagcccaccagtgtcctccgcagaggtggtccatgagcttatcacccaactggggcactgtgggggtcagttaacaatggggtacagaagggctgcccctgggcagcaagacacaggtggccccactacagtaggaaatgcagtgtggggaggctctgcccctacggacagagggcatggccagggtggccagcctgggcagatctctccccgccccatcctctcctgagcctggggggcttggggaccactcacggccatgtagggcttgcagccggcatccattgtcttggccacagagtccacccagtagccactgatgccaaagtcacacatcttacacctaggcaatacccattagcatcgccttcctaaatcaggggaaattgagcctctgtaaggtggagtaacttcctaagatacaaaactcagcattaaagtctgtatacttcaatatcctgcccccttctcatttgtctttactgccttttatgtatgtgttagatgttcaataaattctcttttttaaactgaatttaagccatggagcagtgttttgttgaacaataaatatgatataggacactgttcctccctttcatttatgatccagttcatgaaaaagagaaattctttcattgtgctagaagcttaaagtaatgaaaatgccactttctacattacacagaaactgaagggaatcaaggtgaattgcatgagacatagaaaacaagtgggaaagaaatctagcataatttgccctttgtggacctttattatttagcgtttgagtagatgtttcccccaaatatcttcccatcttaattcatgtctataaagtagacatttatgtctcaccttgtcaagaaggacaaactctaacataaacatttctcaaaaatgcttcctgctaaaatgtaagctcagtctggctagaaattaagctctcttcataaagattaattggcagctaatctgtgcatgctgttctctgaacttgagtgaaagctgtccatcaggcatacagggaatgacggaaaaggtgacaacagaagatgaatgctatgtcactaaccttcaaagatgaccttccttttctttcaaattcttgaaatcttaagacttcattaattcatctctctttgcccttggatcaacattgtgctatacaaaatctcatgtaaaacaatgatctaatgtaataaaaatggcatttttctttcaagcagatgcaagctaactggcatttttacaattgacatatttcctttgtcaatttttcattctgtattggaagtaattgataggtattcctgaagggatgaaggtgtttctgtgttcattgtgatccaaactatttttagacctagtggcatttgtaaaacaatttgtgccagctgaccaaggaccactgtggcagaaagcagcaaacttgcgtaagatgtcactgcctcataagttggctttgaaaactaggggcttactctatagtcttatgtatcaaagacattgatagatgtagtataagattacaatcatattttccttttgacagtcacattataaagcatgatgtattgcaattaatctcaattagctgatcacaattaaaattaatagtttattattgctgataaacaatcatgactctcctgttctcaaatgtgcaagtaattcttgtaattttaatacaaatttgcatattattactaattgatttaatctcattggatttggttcatggatccaatttattaaaatattaataatgggataatgatttgtctgcccatttcatttacactaaaagccacaattcttacaatggtctgcaagcccatcatgatgtgccgcatgttaaccgccaaaattattttatatcttcgcccttgatcttaccagtggtcctggccacctcactgtcctctggacatgccgacatgctgctgtcttatgaccaaaactctagttaatttcttggcttggaaagatagccctccatatatccattgatcattcaacttcctcaagtctttactgaaacctcacattctcgatgagacctattcagtatttcaaactgcctccgagctgcaacattccaaaaccccttactcttctgtgtatttttgaaagcatttattgagatataatttacatagtgtagagtgcacacattaatgtctacaagtcagtggcttttagtatatgcacagataagtggagccatcatcacaatgaattttagagcattttcatcacttcaaaaagaaaccccaccttctctagctgttaacctcctatgcacccatcccctactcaatcctaagcaaccacaaatctgttttctgtctctatagattttcctattctattttcatctaaatagaatcatacaataggtggccttttgtgcctggctcctttcagttggcataatgctatcaaggttcatgtacgtattggtactttatttctttttataactgtataatattcaatttcatggatataacattttgtttatccaataatatttttattgacatttgagttgtgctcagcctttggctattgtaaatagtgctgctaaaaatacttgtgtacaatttgtgtttgaacacctctttccaatactctgggggtatacctgggaataaatttctgggtcatatgacaattctatgtttaatatatttagaagccatcaaactattttccaaagtggccagttctagccatagagtatctaactgtggttttgatttgtagttacttgatgagtgatgctattgtgtacttttttatgggattattgatcgttcgtgtatcttcttgggaaacacatctattcctatcatttatcagttttgagttgggacatttgttactgagttaaaacaatttttctatattcaagatacatatatatacagacatatagatatgtgtttttcaaatatcttcccacaatttttgagatgcctttgacttgcttggttgtcctttgaaacaccaatgtctttaatttttaagaaattttaactatctaatttttattttgttgctcatgtttttggtgttacagctatttctttgctagatccaatatcctgaagattttcccatatgctttattctagctcttgcatgtatgtctttaattcatttgagttaatgtttttgtatgctttggggtaagggttcgaatttattattttgcaagtggtgatccacgtatatgttgttgacccagtgtgttcaaagactgtctcttcctcattgaattgcacatggcaccactgtaagaatccattgactatagatacatagttttatatatggactctcaattctcttccatcaatccatatatttttccttcatcagtattgtgttatcttgattactgatgctttgctgtaaggtttggagcacggaggtgtgaattatcctaatatgttttcttttttcaagactattttggctattttgagtcccttacaattccatgtgtattttagaatcagcttgtcagtttctagacagaagtctgttgggatacttgaagggatttcatcaaatctgtagttcaaattgtaaagtactacaatgttaaatcttccaattcatggttgtaagatgtttgctaactatttagatcttctttaaacaataatttttaattttcagagtaaaatcttgtatcacattttccaaattaattattatttctttttttgatgctattgtacattgaagtgttttcttaatttcattttggggttttcattgtagatgtgtgcaattgatttttgtacatttatcttctatgctgtaatattgctgaaataatttactagttctatcgttcagtggattccttaaaattttctatatacaagaatgttattggcaaaaaaagttttatttcttcctgttcaatatgggtgactcttatttctttacttgccgatttgtcctgcataaaatctttagtacagtgttgactagaagaggtcaaagtatgtatcttattcttatctctaaccatagcgggaaagtatcctttctttcaccactaagttgaatgtttgctgttggcttttcacaagtgccatgtatctggtgtagaaagttctctattcctggttcattgagtttttatttttatttgtaatcattaaagcatttggattttgttaaatgtcttttctgaatctattgagatgatcatgcaattcttctttcttattctgtggataagatgtattaccttaatggattttgggctgttgaaccaacctgggattactagtataaatttcactttgtcatattgtgtaattcttttatatgttgctagaaatgatttgttagtattttttaaggaattttgcatttatacttattgtagttttatttttctatgctatttggactaacttttgtatcaaggtaacactggccccacagaataaattgggaagtgaatatttctcttttttaaaaaagttagtcaagaattaatatcaattagtcaatactaacaaatatgattaatattataaattattaatttctctaatttttattttcttccttctgcttgctttaggtttagtttgctattctttccagtgtcttaatgtggaaggtcatcttatctcatcctttcctttgtcttttcattttctaaatcgtgtctttttagcatcaggtgagctccccaggttggtagtactccatgtttattgctgtacaacaatggcaggtaatatgtcctgaagacaatggaaacttaacattcaaattcctcctagattccactttatgtgatatgtctcttcctttgattggtcctaatttctaccctttctctattataaaccatgagtacaatggcattcaatgagttctgtgagtgtttctagtaaattcttgaaactcagggtgttctggggaaacccctgaactggcagttggtgtcaaaagtgagaatcatcttatatggcctcttcctttgaactttgcagctggacccaaactctgcacaatttgggccagaagtctcatgttgactttgcagcctaaagtatcttgtagtttgtctaacgctcaataaatttgctttcatcaaatattgtatttgttaccccaaaattaccatcatgttttttttactccaaataactaacattgggagaaatagccagctgaatctgtaactcaacagaaacaagtgatccatataccatataagtggccatttcattttgcctccttccaccaaatcttagcaacctcaaccattgccatgagccactgtaggcctaccggctacaaacaaacaagtatcttttaaaaacacttcacactcccatttaataaatttcccagcaaagagatgcctactttaactctatgcaagtggctcatattcgcgaagtctggagatattattcatgtagtgtgagaaaatcatcccagcgatgccagcacattctccttcccatgatctgctaggtttgcaaacatgttcaggccataggtgagagatttgtatttcacagtacaacaattttaaggagggcactgaaacttagattgagcattttagtacagtcacacatcactaaatgatagggatacgttctaacagatgcatccataggcaatttcatcgttttgtaaacatcacagagaatattacaaacacctagattgtacagcttaccacgtctaggttatatggtatagcctctctctcctaggctacaaacctgtgtgctagattactgtactgaatactgcaggcaataagaacacaatggtaagagtttatgtatctaaatatacttaaacatagaaaagtatgtaaaaatatgtattataatctcatgggaccacttttgtgtatgtaatctgtctttgactgaaatgttattatgcatgacatgactctgtgacaaaaataaaataatacattgtaaaaaatgtacacatgtatcaaacatattcatattataaaaataaaaatatttattcagtgtaagaatttgtaatgatcacaaaatgttcacatcttatattttagtacagtttcaaatgcccagtgcaattactacttattcctttgtgtatttttaacatgtatataataaatatttttcaggttcaacaatatatatcaatcctactggctcttataaatattagttaaaatcaattagtaaattcatgtattatatatacacatgtgtatcagtgagtgtgtgtgcatgcatgtgtgtgtaaatgtaattctattgtgtgtgtaaatgtaattggatgcatcctaatatttatccttacctacaagatttccaagattcatttattatctttagatgatgtgcatttaaagatttaccaaataaaactctaattgtggaaaatatcaagatgttattaaattcatcttctgcacataattgtttctttaaatttatgtttcttgcaaaacttgcagtaatgctcatgcacaaaataattttctaaataaaaataacattttctgtcattaattcttaataattatttctccccaaaaattaatgtgaattaattcataattcttaattatagaatagtgttgcccttcagagttctgaaacctttgcatgttgtatacatttcactaactagaacaacttctgaaatattggcattaattaatgtcactctgcaattattgatttcaaagaaattaaatacctttcatattatgaatcacaagggtactttggcacctaatttaatcaagctctttgtatcatcatctacactttaattacttaacaaacatttctcagtgtgagaaagattgagcaggttattgtgctttgttaagatgcaacttttgcttaatctagagataggcaattctccctataagggacaaagagaaaaatgaaagagcaatagagatgtgacaggcatggaaaaagacaatacatttataaaacaaatagggccacagatgacgataatggggataaatcttgagatactgactcagtttataaccgcactgtataatagagcaaatcatttgttaatttttttacaaatggaatttaatttaattaagatgaatacaatgttttaaacaaggcaggtcatcttaaaatagtggaataaattgataaaaccaatgtaaaaatcataaacattttataaagaatttttgtcatgtaatttaatatttttatttaaaatcacccaaatcaaaataattttatcttaattaacaaataatcatcagaagtttaactaatttttactttatattactaggtttaaaaattcttaactatatttttaatcatatatgcttatatataaaatagacataggatatatatttacatgttcacaatattatattgtaattgttcctatggatgtggtttctcagtagaattaataagtacttttaaaattttcaatttcaatgatatatatgtttgacttttctttgacaaagcatacatatattgataggtaataatatgaaaatcttctaaagacattacaggaacatgaaaatgtaattaaatcctcactaatttgtaatgttttatgtaagcagaacacatttaactgaaaattgcttttatgtaatactcaaacaagactaaaaacattttaactagcggagtaagtcttcaaattgataatctgaactatataagaggagaaacttcaggcactcaaatatttgaaatgctacaaaatatttatataaactattatttaacaatttctgtttgtagagtgctatacagtaatcaatataaatggcatctcaagtctttctctagctttgaccacatttacctcctaattttaattattaatatgttggagcaatgcatacaactagattccaatcttcctttttaatgagtaaaaatatgtcctttgagacaccattaaagaaagagcaccttgtataaattcaatgcaaagagacaagatattcatgattctgaagtcttgttctttgatacagcaatgtaattaataataagaagaaaagcaggacatagatgtggagtctattttaatcaaaaattatctatagattttgatgataaaatttaaaaatctactatatttagttagttacaaaaaactaggttgtgggaacatatttggtcaataaacacccctaccaaatgctgacaagaaaaaaagttaggtaccacctttctcctctgcagatggcctgagatgggttaatttgaaagaatgcttccaaacctgaggtgacccccgagaacagcataatccacttctgtctcctacattcagtttctcagtttgtgctcttttaattttggggggagggaagccagtcctttaaaccgatcttcagcatgatggcagagccaaggagtgtggacaggtggcacggtgtctgactttgttccagcagccacttgggctttctctgggtcttctgtgccctagggatagcaccagtattgaaaacatgtctttgtgacattctctatgccaggaactaccaacacattttccttgaaactgatgaaatgaataaaaattaaccaagaggtgtgctgtttgtttctgtttcctcctttctgcagcccttcttcatcatctaatatttttaaatacattgttgatcaccaaaaggagcataagggctttactggtttgtagcagatgtataaatagtccagcccctattccttacctgtagctgctgggaagaaaaccattcttaacactctacaagatctcatctccagaatttgcaccagtttctagctgaggactttctctagcagcacgggagcttgatactggggatgaagtgggaagaaaaggtgagggtaactaagaagaatctccctggattcagtgatgtaattctgaggcatgttccacatagcttcccatagaattaagcccagatatctaacacaggaacttgcctcttaacacgtgtggtactggcttttctatctttcctgttttattttgttctctcttccttgtctcacttttgctgtgtcctcactcctgctttaagaatacccaaacaaatacattcatttattgttttagactctcagaacacagttgatagttgaacttgtaatctatgataatcagcttggatgctatactgacaggaagatggtgaactcacaacgtctaattaagataaaatttaaaaatatattgattcatgtccaaagatttaaaaaacctaagcggcagtgtcacaatttcttctttttagtttacatggtttcttaaacgcctacaattattttaaaggaagccttgtgtctaggaaaaattgagacatatggaataaattactaatccatttctccttgaaatccattagatgcttgatgatttttcacatatatttctgaattgaaaagctagttgggaattatttttataagcatatccttatgtaatattttgtttttaacagtgaattgaaggtttaaagattaaattattccatccagagaataaaaagcaattattccacaaggaaaacatgtgtatgttgacacaacattttaaaatctagattttaaaataggtcccatatacttttaagtcaattagaatatgtttgtatcagtgtgtctacagttttacacctgtcaaaatgtacttgaactacaagtaccttgaacaattttgaaatttattattcctctgaaactgactaaaagaattatggtagagtgaaattctgattggcataatttgggagagaaattattccttggacatcaacctctgccaagatagtttataatgacattgaggctttttgatttacaaaatttgttatataaaaaatactaagacaatgacagataatacacagactttaattaaaattgtactaaaattgaatgtctaaataaattagaagggtacatggtacatctaattgcatgtttatatattttatttgtgcattttattcctagggttgcttttggtttagtttgtaaaacgttcttatttttatgataatgtagtatatactaaatacagaaaaatcaggaaatagaaaatgaagaagaaaacattaactattgtcaaccaaataaaaattgtgcagtctctaagcacatgaactatgtattatttgtacagcatgtacaatgtttatgcttcacagggtgaggtagagactgcaaaacattgaatctgggacaaataagaaagtaaggaaattttcacaatatattaatattatagaaaatgttgaacttagcagttaagatacaagtagtgaaaaatgatagtatttaaggagaaatagaaaatttaatctacatctgtaatgtgtgagaagtattagaataatgcttgtatttctggattggcatcgatttctattgagactggaaacaaagtagaagtgagggaaaaagaatttaaattgtggatacttgagttttatacctaggagtttgagaaatacattttgttactatcaaagcagttggcacaagagtgtacaaaattccctaattgtgtctatgtggagaagacatagacaaacagagaatagcaaaacagaaatagcaaaaaagcacaaataaattttacctgtatttttacgtaaaaggcaattagagtaggaaaacataaaatttgtgttttatcaaaatttttctctttctcataatatagttgattatattactggaaaaattgaagcattggtatgctcacacaaaaaaaaagtaaaatataaggtcaaaaccatgggaatgcagggagcagatgaaatatacctcaacaccgaaactgattttgccctacggacatgtaccaaaatgaatgagtgcagattcctactgtcatacatcacataggacgtaaagaaatacatagtttttcccaagataaggcatcacacaggagctcctccctaaagctaggaccaaaatttctatcttcagtataaagaagaatcagaggtaaattaatctcatttcacattccctggaaacggcaaataaaaatgacttgagattggacagatttaaagaaactcaatcattaatgatttacagcaattaatttaaaaattgtttaaatgtgcagtccaaacatacgtccaaacatctctaggccaagaattaacataatgtggtcccagaatggtggtgcctttagtagactcacaaaaaaattcaaattctctttggcaaattttcttcttactaatcctcaaaagtgcacaaaaataattttcagagaaaaataaatatttgtcattcaaaggcatctaagtatgcaggaaatgatattccaccatttgaaaggaaagcagaaaaacagtacaaacagatccacaaaggttcattagtagaaatatcactgttagattataaagcacatttgctttaaaaaaaatttaaaaaaatgaatatatttttaggagactaaaaaattgatgtagcaaatttgaaaagtagtttgtataaaaatatagtattttaaattaaaaactcaaaaatgaactcatcagattagacgtggccatggtgggagttaataaatatttcagaatgcattacagaaaatttaaaaaaatgcaaaatgtagacagaatcatgaagagacatgggagatacagtgagaaagtgtagcatgtgtttagtgagtgttctcatagaagggaactgggaagcgacaatatgtgatggtattttggctgaaagttctctagacttttgtaagacactaaaccgcatattcaaaaattccatgcatgctaagcaagctacagtggagataaacctacacctatgtatctcctagagaaatagtaaagaatcaggaagggaaaaatatttcaattagcactagaaaaatcaaattacctttaatcatattgaaatcggaaagaatgaaaggtaaaataaacaatattatttgttaagaataataatgccattctgaaattctcaaccaagaaaagtattcatcaacctatggctaaataacatatttagagacaaaaaacaaaacgccaccagcagaattccactaaagaaactaaagagaaactctgaaaacatgcttcagaaaggctgaagcttcgaaatcaaagaatgaacacagagcaaaatatattgtaaacatacagatagatctaaataaaaaattaggtgttgaaacaaaaagatatttaaaattagataaacactgcaatatgtatgttaggaagcaaattattagggctgaagtattcaaagaccccttaattgtctgacaagagcagaaagttgagtatgactttgcaattttttttttttttttttgagaaggagtctcactcactctttcacccaggctggagtgaagtagcgcgatctcggctcactgcaagcttcgcctccggggttcacgccattctcctgcctcagcctcccgagtagctgggactacaggctctccgccactgcgcccggctaattttttgggtttttaggagagatggggtttcatcgtgttaaccaggatggtctccatctcctgacctcgtgatccgcccgccttggcataccaaagtgctgggactacaggcgtgagccaccgcgcccggccctcttttatgttctgtagtaaataaagatgaccgattcctgaacattgagnnnnnnnnnnnnnnnnnnnnnnnnnnnnnnnnnnnnnnnnnnnnnnnnnnnnnnnnnnnnnnnnnnnnnnnnnnnnnnnnnnnnnnnnnnnnnnnnnnnnnnnnnnnnnnnnnnnnnnnnnnnnnnnnnnnnnnnnnnnnnnnnnnnnnnnnnnnnnnnnnnnnnnnnnnnnnnnnnnnnnnnnnnnnnnnnnnnnnnnnnnnnnnnnnnnnnnnnnnnnnnnnnnnnnnnnnnnnnnnnnnnnnnnnnnnnnnnnnnnnnnnnnnnnnnnnnnnnnnnnnnnnnnnnnnnnnnnnnnnnnnnnnnnnnnnnnnnnnnnnnnnnnnnnnnnnnnnnnnnnnnnnnnnnnnnnnnnnnnnnnnnnnnnnnnnnnnnnnnnnnnnnnnnnnnnnnnnnnnnnnnnnnnnnnnnnnnnnnnnnnnnnnnnnnnnnnnnnnnnnnnnnnnnnnnnnnnnnnnnnnnnnnnnnnnnnnnnnnnnnnnnnnnnnnnnnnnnnnnnnnnnnnnnnnnnnnnnnnnnnnnnnnnnnnnnnnnnnnnnnnnnnnnnnnnnnnnnnnnnnnnnnnnnnnnnnnnnnnnnnnnnnnnnnnnnnnnnnnnnnnnnnnnnnnnnnnnnnnnnnnnnnnnnnnnnnnnnnnnnnnnnnnnnnnnnnnnnnnnnnnnnnnnnnnnnnnnnnnnnnnnnnnnnnnnnnnnnnnnnnnnnnnnnnnnnnnnnnnnnnnnnnnnnnnnnnnnnnnnnnnnnnnnnnnnnnnnnnnnnnnnnnnnnnnnnnnnnnnnnnnnnnnnnnnnnnnnnnnnnnnnnnnnnnnnnnnnnnnnnnnnnnnnnnnnnnnnnnnnnnnnnnnnnnnnnnnnnnnnnnnnnnnnnnnnnnnnnnnnnnnnnnnnnnnnnnnnnnnnnnnnnnnnnnnnnnnnnnnnnnnnnnnnnnnnnnnnnnnnnnnnnnnnnnnnnnnnnnnnnnnnnnnnnnnnnnnnnnnnnnnnnnnnnnnnnnnnnnnnnnnnnnnnnnnnnnnnnnnnnnnnnnnnnnnnnnnnnnnnnnnnnnnnnnnnnnnnnnnnnnnnnnnnnnnnnnnnnnnnnnnnnnnnnnnnnnnnnnnnnnnnnnnnnnnnnnnnnnnnnnnnnnnnnnnnnnnnnnnnnnnnnnnnnnnnnnnnnnnnnnnnnnnnnnnnnnnnnnnnnnnnnnnnnnnnnnnnnnnnnnnnnnnnnnnnnnnnnnnnnnnnnnnnnnnnnnnnnnnnnnnnnnnnnnnnnnnnnnnnnnnnnnnnnnnnnnnnnnnnnnnnnnnnnnnnnnnnnnnnnnnnnnnnnnnnnnnnnnnnnnnnnnnnnnnnnnnnnnnnnnnnnnnnnnnnnnnnnnnnnnnnnnnnnnnnnnnnnnnnnnnnnnnnnnnnnnnnnnnnnnnnnnnnnnnnnnnnnnnnnnnnnnnnnnnnnnnnnnnnnnnnnnnnnnnnnnnnnnnnnnnnnnnnnnnnnnnnnnnnnnnnnnnnnnnnnnnnnnnnnnnnnnnnnnnnnnnnnnnnnnnnnnnnnnnnnnnnnnnnnnnnnnnnnnnnnnnnnnnnnnnnnnnnnnnnnnnnnnnnnnnnnnnnnnnnnnnnnnnnnnnnnnnnnnnnnnnnnnnnnnnnnnnnnnnnnnnnnnnnnnnnnnnnnnnnnnnnnnnnnnnnnnnnnnnnnnnnnnnnnnnnnnnnnnnnnnnnnnnnnnnnnnnnnnnnnnnnnnnnnnnnnnnnnnnnnnnnnnnnnnnnnnnnnnnnnnnnnnnnnnnnnnnnnnnnnnnnnnnnnnnnnnnnnnnnnnnnnnnnnnnnnnnnnnnnnnnnnnnnnnnnnnnnnnnnnnnnnnnnnnnnnnnnnnnnnnnnnnnnnnnnnnnnnnnnnnnnnnnnnnnnnnnnnnnnnnnnnnnnnnnnnnnnnnnnnnnnnnnnnnnnnnnnnnnnnnnnnnnnnnnnnnnnnnnnnnnnnnnnnnnnnnnnnnnnnnnnnnnnnnnnnnnnnnnnnnnnnnnnnnnnnnnnnnnnnnnnnnnnnnnnnnnnnnnnnnnnnnnnnnnnnnnnnnnnnnnnnnnnnnnnnnnnnnnnnnnnnnnnnnnnnnnnnnnnnnnnnnnnnnnnnnnnnnnnnnnnnnnnnnnnnnnnnnnnnnnnnnnnnnnnnnnnnnnnnnnnnnnnnnnnnnnnnnnnnnnnnnnnnnnnnnnnnnnnnnnnnnnnnnnnnnnnnnnnnnnnnnnnnnnnnnnnnnnnnnnnnnnnnnnnnnnnnnnnnnnnnnnnnnnnnnnnnnnnnnnnnnnnnnnnnnnnnnnnnnnnnnnnnnnnnnnnnnnnnnnnnnnnnnnnnnnnnnnnnnnnnnnnnnnnnnnnnnnnnnnnnnnnnnnnnnnnnnnnnnnnnnnnnnnnnnnnnnnnnnnnnnnnnnnnnnnnnnnnnnnnnnnnnnnnnnnnnnnnnnnnnnnnnnnnnnnnnnnnnnnnnnnnnnnnnnnnnnnnnnnnnnnnnnnnnnnnnnnnnnnnnnnnnnnnnnnnnnnnnnnnnnnnnnnnnnnnnnnnnnnnnnnnnnnnnnnnnnnnnnnnnnnnnnnnnnnnnnnnnnnnnnnnnnnnnnnnnnnnnnnnnnnnnnnnnnnnnnnnnnnnnnnnnnnnnnnnnnnnnnnnnnnnnnnnnnnnnnnnnnnnnnnnnnnnnnnnnnnnnnnnnnnnnnnnnnnnnnnnnnnnnnnnnnnnnnnnnnnnnnnnnnnnnnnnnnnnnnnnnnnnnnnnnnnnnnnnnnnnnnnnnnnnnnnnnnnnnnnnnnnnnnnnnnnnnnnnnnnnnnnnnnnnnnnnnnnnnnnnnnnnnnnnnnnnnnnnnnnnnnnnnnnnnnnnnnnnnnnnnnnnnnnnnnnnnnnnnnnnnnnnnnnnnnnnnnnnnnnnnnnnnnnnnnnnnnnnnnnnnnnnnnnnnnnnnnnnnnnnnnnnnnnnnnnnnnnnnnnnnnnnnnnnnnnnnnnnnnnnnnnnnnnnnnnnnnnnnnnnnnnnnnnnnnnnnnnnnnnnnnnnnnnnnnnnnnnnnnnnnnnnnnnnnnnnnnnnnnnnnnnnnnnnnnnnnnnnnnnnnnnnnnnnnnnnnnnnnnnnnnnnnnnnnnnnnnnnnnnnnnnnnnnnnnnnnnnnnnnnnnnnnnnnnnnnnnnnnnnnnnnnnnnnnnnnnnnnnnnnnnnnnnnnnnnnnnnnnnnnnnnnnnnnnnnnnnnnnnnnnnnnnnnnnnnnnnnnnnnnnnnnnnnnnnnnnnnnnnnnnnnnnnnnnnnnnnnnnnnnnnnnnnnnnnnnnnnnnnnnnnnnnnnnnnnnnnnnnnnnnnnnnnnnnnnnnnnnnnnnnnnnnnnnnnnnnnnnnnnnnnnnnnnnnnnnnnnnnnnnnnnnnnnnnnnnnnnnnnnnnnnnnnnnnnnnnnnnnnnnnnnnnnnnnnnnnnnnnnnnnnnnnnnnnnnnnnnnnnnnnnnnnnnnnnnnnnnnnnnnnnnnnnnnnnnnnnnnnnnnnnnnnnnnnnnnnnnnnnnnnnnnnnnnnnnnnnnnnnnnnnnnnnnnnnnnnnnnnnnnnnnnnnnnnnnnnnnnnnnnnnnnnnnnnnnnnnnnnnnnnnnnnnnnnnnnnnnnnnnnnnnnnnnnnnnnnnnnnnnnnnnnnnnnnnnnnnnnnnnnnnnnnnnnnnnnnnnnnnnnnnnnnnnnnnnnnnnnnnnnnnnnnnnnnnnnnnnnnnnnnnnnnnnnnnnnnnnnnnnnnnnnnnnnnnnnnnnnnnnnnnnnnnnnnnnnnnnnnnnnnnnnnnnnnnnnnnnnnnnnnnnnnnnnnnnnnnnnnnnnnnnnnnnnnnnnnnnnnnnnnnnnnnnnnnnnnnnnnnnnnnnnnnnnnnnnnnnnnnnnnnnnnnnnnnnnnnnnnnnnnnnnnnnnnnnnnnnnnnnnnnnnnnnnnnnnnnnnnnnnnnnnnnnnnnnnnnnnnnnnnnnnnnnnnnnnnnnnnnnnnnnnnnnnnnnnnnnnnnnnnnnnnnnnnnnnnnnnnnnnnnnnnnnnnnnnnnnnnnnnnnnnnnnnnnnnnnnnnnnnnnnnnnnnnnnnnnnnnnnnnnnnnnnnnnnnnnnnnnnnnnnnnnnnnnnnnnnnnnnnnnnnnnnnnnnnnnnnnnnnnnnnnnnnnnnnnnnnnnnnnnnnnnnnnnnnnnnnnnnnnnnnnnnnnnnnnnnnnnnnnnnnnnnnnnnnnnnnnnnnnnnnnnnnnnnnnnnnnnnnnnnnnnnnnnnnnnnnnnnnnnnnnnnnnnnnnnnnnnnnnnnnnnnnnnnnnnnnnnnnnnnnnnnnnnnnnnnnnnnnnnnnnnnnnnnnnnnnnnnnnnnnnnnnnnnnnnnnnnnnnnnnnnnnnnnnnnnnnnnnnnnnnnnnnnnnnnnnnnnnnnnnnnnnnnnnnnnnnnnnnnnnnnnnnnnnnnnnnnnnnnnnnnnnnnnnnnnnnnnnnnnnnnnnnnnnnnnnnnnnnnnnnnnnnnnnnnnnnnnnnnnnnnnnnnnnnnnnnnnnnnnnnnnnnnnnnnnnnnnnnnnnnnnnnnnnnnnnnnnnnnnnnnnnnnnnnnnnnnnnnnnnnnnnnnnnnnnnnnnnnnnnnnnnnnnnnnnnnnnnnnnnnnnnnnnnnnnnnnnnnnnnnnnnnnnnnnnnnnnnnnnnnnnnnnnnnnnnnnnnnnnnnnnnnnnnnnnnnnnnnnnnnnnnnnnnnnnnnnnnnnnnnnnnnnnnnnnnnnnnnnnnnnnnnnnnnnnnnnnnnnnnnnnnnnnnnnnnnnnnnnnnnnnnnnnnnnnnnnnnnnnnnnnnnnnnnnnnnnnnnnnnnnnnnnnnnnnnnnnnnnnnnnnnnnnnnnnnnnnnnnnnnnnnnnnnnnnnnnnnnnnnnnnnnnnnnnnnnnnnnnnnnnnnnnnnnnnnnnnnnnnnnnnnnnnnnnnnnnnnnnnnnnnnnnnnnnnnnnnnnnnnnnnnnnnnnnnnnnnnnnnnnnnnnnnnnnnnnnnnnnnnnnnnnnnnnnnnnnnnnnnnnnnnnnnnnnnnnnnnnnnnnnnnnnnnnnnnnnnnnnnnnnnnnnnnnnnnnnnnnnnnnnnnnnnnnnnnnnnnnnnnnnnnnnnnnnnnnnnnnnnnnnnnnnnnnnnnnnnnnnnnnnnnnnnnnnnnnnnnnnnnnnnnnnnnnnnnnnnnnnnnnnnnnnnnnnnnnnnnnnnnnnnnnnnnnnnnnnnnnnnnnnnnnnnnnnnnnnnnnnnnnnnnnnnnnnnnnnnnnnnnnnnnnnnnnnnnnnnnnnnnnnnnnnnnnnnnnnnnnnnnnnnnnnnnnnnnnnnnnnnnnnnnnnnnnnnnnnnnnnnnnnnnnnnnnnnnnnnnnnnnnnnnnnnnnnnnnnnnnnnnnnnnnnnnnnnnnnnnnnnnnnnnnnnnnnnnnnnnnnnnnnnnnnnnnnnnnnnnnnnnnnnnnnnnnnnnnnnnnnnnnnnnnnnnnnnnnnnnnnnnnnnnnnnnnnnnnnnnnnnnnnnnnnnnnnnnnnnnnnnnnnnnnnnnnnnnnnnnnnnnnnnnnnnnnnnnnnnnnnnnnnnnnnnnnnnnnnnnnnnnnnnnnnnnnnnnnnnnnnnnnnnnnnnnnnnnnnnnnnnnnnnnnnnnnnnnnnnnnnnnnnnnnnnnnnnnnnnnnnnnnnnnnnnnnnnnnnnnnnnnnnnnnnnnnnnnnnnnnnnnnnnnnnnnnnnnnnnnnnnnnnnnnnnnnnnnnnnnnnnnnnnnnnnnnnnnnnnnnnnnnnnnnnnnnnnnnnnnnnnnnnnnnnnnnnnnnnnnnnnnnnnnnnnnnnnnnnnnnnnnnnnnnnnnnnnnnnnnnnnnnnnnnnnnnnnnnnnnnnnnnnnnnnnnnnnnnnnnnnnnnnnnnnnnnnnnnnnnnnnnnnnnnnnnnnnnnnnnnnnnnnnnnnnnnnnnnnnnnnnnnnnnnnnnnnnnnnnnnnnnnnnnnnnnnnnnnnnnnnnnnnnnnnnnnnnnnnnnnnnnnnnnnnnnnnnnnnnnnnnnnnnnnnnnnnnnnnnnnnnnnnnnnnnnnnnnnnnnnnnnnnnnnnnnnnnnnnnnnnnnnnnnnnnnnnnnnnnnnnnnnnnnnnnnnnnnnnnnnnnnnnnnnnnnnnnnnnnnnnnnnnnnnnnnnnnnnnnnnnnnnnnnnnnnnnnnnnnnnnnnnnnnnnnnnnnnnnnnnnnnnnnnnnnnnnnnnnnnnnnnnnnnnnnnnnnnnnnnnnnnnnnnnnnnnnnnnnnnnnnnnnnnnnnnnnnnnnnnnnnnnnnnnnnnnnnnnnnnnnnnnnnnnnnnnnnnnnnnnnnnnnnnnnnnnnnnnnnnnnnnnnnnnnnnnnnnnnnnnnnnnnnnnnnnnnnnnnnnnnnnnnnnnnnnnnnnnnnnnnnnnnnnnnnnnnnnnnnnnnnnnnnnnnnnnnnnnnnnnnnnnnnnnnnnnnnnnnnnnnnnnnnnnnnnnnnnnnnnnnnnnnnnnnnnnnnnnnnnnnnnnnnnnnnnnnnnnnnnnnnnnnnnnnnnnnnnnnnnnnnnnnnnnnnnnnnnnnnnnnnnnnnnnnnnnnnnnnnnnnnnnnnnnnnnnnnnnnnnnnnnnnnnnnnnnnnnnnnnnnnnnnnnnnnnnnnnnnnnnnnnnnnnnnnnnnnnnnnnnnnnnnnnnnnnnnnnnnnnnnnnnnnnnnnnnnnnnnnnnnnnnnnnnnnnnnnnnnnnnnnnnnnnnnnnnnnnnnnnnnnnnnnnnnnnnnnnnnnnnnnnnnnnnnnnnnnnnnnnnnnnnnnnnnnnnnnnnnnnnnnnnnnnnnnnnnnnnnnnnnnnnnnnnnnnnnnnnnnnnnnnnnnnnnnnnnnnnnnnnnnnnnnnnnnnnnnnnnnnnnnnnnnnnnnnnnnnnnnnnnnnnnnnnnnnnnnnnnnnnnnnnnnnnnnnnnnnnnnnnnnnnnnnnnnnnnnnnnnnnnnnnnnnnnnnnnnnnnnnnnnnnnnnnnnnnnnnnnnnnnnnnnnnnnnnnnnnnnnnnnnnnnnnnnnnnnnnnnnnnnnnnnnnnnnnnnnnnnnnnnnnnnnnnnnnnnnnnnnnnnnnnnnnnnnnnnnnnnnnnnnnnnnnnnnnnnnnnnnnnnnnnnnnnnnnnnnnnnnnnnnnnnnnnnnnnnnnnnnnnnnnnnnnnnnnnnnnnnnnnnnnnnnnnnnnnnnnnnnnnnnnnnnnnnnnnnnnnnnnnnnnnnnnnnnnnnnnnnnnnnnnnnnnnnnnnnnnnnnnnnnnnnnnnnnnnnnnnnnnnnnnnnnnnnnnnnnnnnnnnnnnnnnnnnnnnnnnnnnnnnnnnnnnnnnnnnnnnnnnnnnnnnnnnnnnnnnnnnnnnnnnnnnnnnnnnnnnnnnnnnnnnnnnnnnnnnnnnnnnnnnnnnnnnnnnnnnnnnnnnnnnnnnnnnnnnnnnnnnnnnnnnnnnnnnnnnnnnnnnnnnnnnnnnnnnnnnnnnnnnnnnnnnnnnnnnnnnnnnnnnnnnnnnnnnnnnnnnnnnnnnnnnnnnnnnnnnnnnnnnnnnnnnnnnnnnnnnnnnnnnnnnnnnnnnnnnnnnnnnnnnnnnnnnnnnnnnnnnnnnnnnnnnnnnnnnnnnnnnnnnnnnnnnnnnnnnnnnnnnnnnnnnnnnnnnnnnnnnnnnnnnnnnnnnnnnnnnnnnnnnnnnnnnnnnnnnnnnnnnnnnnnnnnnnnnnnnnnnnnnnnnnnnnnnnnnnnnnnnnnnnnnnnnnnnnnnnnnnnnnnnnnnnnnnnnnnnnnnnnnnnnnnnnnnnnnnnnnnnnnnnnnnnnnnnnnnnnnnnnnnnnnnnnnnnnnnnnnnnnnnnnnnnnnnnnnnnnnnnnnnnnnnnnnnnnnnnnnnnnnnnnnnnnnnnnnnnnnnnnnnnnnnnnnnnnnnnnnnnnnnnnnnnnnnnnnnnnnnnnnnnnnnnnnnnnnnnnnnnnnnnnnnnnnnnnnnnnnnnnnnnnnnnnnnnnnnnnnnnnnnnnnnnnnnnnnnnnnnnnnnnnnnnnnnnnnnnnnnnnnnnnnnnnnnnnnnnnnnnnnnnnnnnnnnnnnnnnnnnnnnnnnnnnnnnnnnnnnnnnnnnnnnnnnnnnnnnnnnnnnnnnnnnnnnnnnnnnnnnnnnnnnnnnnnnnnnnnnnnnnnnnnnnnnnnnnnnnnnnnnnnnnnnnnnnnnnnnnnnnnnnnnnnnnnnnnnnnnnnnnnnnnnnnnnnnnnnnnnnnnnnnnnnnnnnnnnnnnnnnnnnnnnnnnnnnnnnnnnnnnnnnnnnnnnnnnnnnnnnnnnnnnnnnnnnnnnnnnnnnnnnnnnnnnnnnnnnnnnnnnnnnnnnnnnnnnnnnnnnnnnnnnnnnnnnnnnnnnnnnnnnnnnnnnnnnnnnnnnnnnnnnnnnnnnnnnnnnnnnnnnnnnnnnnnnnnnnnnnnnnnnnnnnnnnnnnnnnnnnnnnnnnnnnnnnnnnnnnnnnnnnnnnnnnnnnnnnnnnnnnnnnnnnnnnnnnnnnnnnnnnnnnnnnnnnnnnnnnnnnnnnnnnnnnnnnnnnnnnnnnnnnnnnnnnnnnnnnnnnnnnnnnnnnnnnnnnnnnnnnnnnnnnnnnnnnnnnnnnnnnnnnnnnnnnnnnnnnnnnnnnnnnnnnnnnnnnnnnnnnnnnnnnnnnnnnnnnnnnnnnnnnnnnnnnnnnnnnnnnnnnnnnnnnnnnnnnnnnnnnnnnnnnnnnnnnnnnnnnnnnnnnnnnnnnnnnnnnnnnnnnnnnnnnnnnnnnnnnnnnnnnnnnnnnnnnnnnnnnnnnnnnnnnnnnnnnnnnnnnnnnnnnnnnnnnnnnnnnnnnnnnnnnnnnnnnnnnnnnnnnnnnnnnnnnnnnnnnnnnnnnnnnnnnnnnnnnnnnnnnnnnnnnnnnnnnnnnnnnnnnnnnnnnnnnnnnnnnnnnnnnnnnnnnnnnnnnnnnnnnnnnnnnnnnnnnnnnnnnnnnnnnnnnnnnnnnnnnnnnnnnnnnnnnnnnnnnnnnnnnnnnnnnnnnnnnnnnnnnnnnnnnnnnnnnnnnnnnnnnnnnnnnnnnnnnnnnnnnnnnnnnnnnnnnnnnnnnnnnnnnnnnnnnnnnnnnnnnnnnnnnnnnnnnnnnnnnnnnnnnnnnnnnnnnnnnnnnnnnnnnnnnnnnnnnnnnnnnnnnnnnnnnnnnnnnnnnnnnnnnnnnnnnnnnnnnnnnnnnnnnnnnnnnnnnnnnnnnnnnnnnnnnnnnnnnnnnnnnnnnnnnnnnnnnnnnnnnnnnnnnnnnnnnnnnnnnnnnnnnnnnnnnnnnnnnnnnnnnnnnnnnnnnnnnnnnnnnnnnnnnnnnnnnnnnnnnnnnnnnnnnnnnnnnnnnnnnnnnnnnnnnnnnnnnnnnnnnnnnnnnnnnnnnnnnnnnnnnnnnnnnnnnnnnnnnnnnnnnnnnnnnnnnnnnnnnnnnnnnnnnnnnnnnnnnnnnnnnnnnnnnnnnnnnnnnnnnnnnnnnnnnnnnnnnnnnnnnnnnnnnnnnnnnnnnnnnnnnnnnnnnnnnnnnnnnnnnnnnnnnnnnnnnnnnnnnnnnnnnnnnnnnnnnnnnnnnnnnnnnnnnnnnnnnnnnnnnnnnnnnnnnnnnnnnnnnnnnnnnnnnnnnnnnnnnnnnnnnnnnnnnnnnnnnnnnnnnnnnnnnnnnnnnnnnnnnnnnnnnnnnnnnnnnnnnnnnnnnnnnnnnnnnnnnnnnnnnnnnnnnnnnnnnnnnnnnnnnnnnnnnnnnnnnnnnnnnnnnnnnnnnnnnnnnnnnnnnnnnnnnnnnnnnnnnnnnnnnnnnnnnnnnnnnnnnnnnnnnnnnnnnnnnnnnnnnnnnnnnnnnnnnnnnnnnnnnnnnnnnnnnnnnnnnnnnnnnnnnnnnnnnnnnnnnnnnnnnnnnnnnnnnnnnnnnnnnnnnnnnnnnnnnnnnnnnnnnnnnnnnnnnnnnnnnnnnnnnnnnnnnnnnnnnnnnnnnnnnnnnnnnnnnnnnnnnnnnnnnnnnnnnnnnnnnnnnnnnnnnnnnnnnnnnnnnnnnnnnnnnnnnnnnnnnnnnnnnnnnnnnnnnnnnnnnnnnnnnnnnnnnnnnnnnnnnnnnnnnnnnnnnnnnnnnnnnnnnnnnnnnnnnnnnnnnnnnnnnnnnnnnnnnnnnnnnnnnnnnnnnnnnnnnnnnnnnnnnnnnnnnnnnnnnnnnnnnnnnnnnnnnnnnnnnnnnnnnnnnnnnnnnnnnnnnnnnnnnnnnnnnnnnnnnnnnnnnnnnnnnnnnnnnnnnnnnnnnnnnnnnnnnnnnnnnnnnnnnnnnnnnnnnnnnnnnnnnnnnnnnnnnnnnnnnnnnnnnnnnnnnnnnnnnnnnnnnnnnnnnnnnnnnnnnnnnnnnnnnnnnnnnnnnnnnnnnnnnnnnnnnnnnnnnnnnnnnnnnnnnnnnnnnnnnnnnnnnnnnnnnnnnnnnnnnnnnnnnnnnnnnnnnnnnnnnnnnnnnnnnnnnnnnnnnnnnnnnnnnnnnnnnnnnnnnnnnnnnnnnnnnnnnnnnnnnnnnnnnnnnnnnnnnnnnnnnnnnnnnnnnnnnnnnnnnnnnnnnnnnnnnnnnnnnnnnnnnnnnnnnnnnnnnnnnnnnnnnnnnnnnnnnnnnnnnnnnnnnnnnnnnnnnnnnnnnnnnnnnnnnnnnnnnnnnnnnnnnnnnnnnnnnnnnnnnnnnnnnnnnnnnnnnnnnnnnnnnnnnnnnnnnnnnnnnnnnnnnnnnnnnnnnnnnnnnnnnnnnnnnnnnnnnnnnnnnnnnnnnnnnnnnnnnnnnnnnnnnnnnnnnnnnnnnnnnnnnnnnnnnnnnnnnnnnnnnnnnnnnnnnnnnnnnnnnnnnnnnnnnnnnnnnnnnnnnnnnnnnnnnnnnnnnnnnnnnnnnnnnnnnnnnnnnnnnnnnnnnnnnnnnnnnnnnnnnnnnnnnnnnnnnnnnnnnnnnnnnnnnnnnnnnnnnnnnnnnnnnnnnnnnnnnnnnnnnnnnnnnnnnnnnnnnnnnnnnnnnnnnnnnnnnnnnnnnnnnnnnnnnnnnnnnnnnnnnnnnnnnnnnnnnnnnnnnnnnnnnnnnnnnnnnnnnnnnnnnnnnnnnnnnnnnnnnnnnnnnnnnnnnnnnnnnnnnnnnnnnnnnnnnnnnnnnnnnnnnnnnnnnnnnnnnnnnnnnnnnnnnnnnnnnnnnnnnnnnnnnnnnnnnnnnnnnnnnnnnnnnnnnnnnnnnnnnnnnnnnnnnnnnnnnnnnnnnnnnnnnnnnnnnnnnnnnnnnnnnnnnnnnnnnnnnnnnnnnnnnnnnnnnnnnnnnnnnnnnnnnnnnnnnnnnnnnnnnnnnnnnnnnnnnnnnnnnnnnnnnnnnnnnnnnnnnnnnnnnnnnnnnnnnnnnnnnnnnnnnnnnnnnnnnnnnnnnnnnnnnnnnnnnnnnnnnnnnnnnnnnnnnnnnnnnnnnnnnnnnnnnnnnnnnnnnnnnnnnnnnnnnnnnnnnnnnnnnnnnnnnnnnnnnnnnnnnnnnnnnnnnnnnnnnnnnnnnnnnnnnnnnnnnnnnnnnnnnnnnnnnnnnnnnnnnnnnnnnnnnnnnnnnnnnnnnnnnnnnnnnnnnnnnnnnnnnnnnnnnnnnnnnnnnnnnnnnnnnnnnnnnnnnnnnnnnnnnnnnnnnnnnnnnnnnnnnnnnnnnnnnnnnnnnnnnnnnnnnnnnnnnnnnnnnnnnnnnnnnnnnnnnnnnnnnnnnnnnnnnnnnnnnnnnnnnnnnnnnnnnnnnnnnnnnnnnnnnnnnnnnnnnnnnnnnnnnnnnnnnnnnnnnnnnnnnnnnnnnnnnnnnnnnnnnnnnnnnnnnnnnnnnnnnnnnnnnnnnnnnnnnnnnnnnnnnnnnnnnnnnnnnnnnnnnnnnnnnnnnnnnnnnnnnnnnnnnnnnnnnnnnnnnnnnnnnnnnnnnnnnnnnnnnnnnnnnnnnnnnnnnnnnnnnnnnnnnnnnnnnnnnnnnnnnnnnnnnnnnnnnnnnnnnnnnnnnnnnnnnnnnnnnnnnnnnnnnnnnnnnnnnnnnnnnnnnnnnnnnnnnnnnnnnnnnnnnnnnnnnnnnnnnnnnnnnnnnnnnnnnnnnnnnnnnnnnnnnnnnnnnnnnnnnnnnnnnnnnnnnnnnnnnnnnnnnnnnnnnnnnnnnnnnnnnnnnnnnnnnnnnnnnnnnnnnnnnnnnnnnnnnnnnnnnnnnnnnnnnnnnnnnnnnnnnnnnnnnnnnnnnnnnnnnnnnnnnnnnnnnnnnnnnnnnnnnnnnnnnnnnnnnnnnnnnnnnnnnnnnnnnnnnnnnnnnnnnnnnnnnnnnnnnnnnnnnnnnnnnnnnnnnnnnnnnnnnnnnnnnnnnnnnnnnnnnnnnnnnnnnnnnnnnnnnnnnnnnnnnnnnnnnnnnnnnnnnnnnnnnnnnnnnnnnnnnnnnnnnnnnnnnnnnnnnnnnnnnnnnnnnnnnnnnnnnnnnnnnnnnnnnnnnnnnnnnnnnnnnnnnnnnnnnnnnnnnnnnnnnnnnnnnnnnnnnnnnnnnnnnnnnnnnnnnnnnnnnnnnnnnnnnnnnnnnnnnnnnnnnnnnnnnnnnnnnnnnnnnnnnnnnnnnnnnnnnnnnnnnnnnnnnnnnnnnnnnnnnnnnnnnnnnnnnnnnnnnnnnnnnnnnnnnnnnnnnnnnnnnnnnnnnnnnnnnnnnnnnnnnnnnnnnnnnnnnnnnnnnnnnnnnnnnnnnnnnnnnnnnnnnnnnnnnnnnnnnnnnnnnnnnnnnnnnnnnnnnnnnnnnnnnnnnnnnnnnnnnnnnnnnnnnnnnnnnnnnnnnnnnnnnnnnnnnnnnnnnnnnnnnnnnnnnnnnnnnnnnnnnnnnnnnnnnnnnnnnnnnnnnnnnnnnnnnnnnnnnnnnnnnnnnnnnnnnnnnnnnnnnnnnnnnnnnnnnnnnnnnnnnnnnnnnnnnnnnnnnnnnnnnnnnnnnnnnnnnnnnnnnnnnnnnnnnnnnnnnnnnnnnnnnnnnnnnnnnnnnnnnnnnnnnnnnnnnnnnnnnnnnnnnnnnnnnnnnnnnnnnnnnnnnnnnnnnnnnnnnnnnnnnnnnnnnnnnnnnnnnnnnnnnnnnnnnnnnnnnnnnnnnnnnnnnnnnnnnnnnnnnnnnnnnnnnnnnnnnnnnnnnnnnnnnnnnnnnnnnnnnnnnnnnnnnnnnnnnnnnnnnnnnnnnnnnnnnnnnnnnnnnnnnnnnnnnnnnnnnnnnnnnnnnnnnnnnnnnnnnnnnnnnnnnnnnnnnnnnnnnnnnnnnnnnnnnnnnnnnnnnnnnnnnnnnnnnnnnnnnnnnnnnnnnnnnnnnnnnnnnnnnnnnnnnnnnnnnnnnnnnnnnnnnnnnnnnnnnnnnnnnnnnnnnnnnnnnnnnnnnnnnnnnnnnnnnnnnnnnnnnnnnnnnnnnnnnnnnnnnnnnnnnnnnnnnnnnnnnnnnnnnnnnnnnnnnnnnnnnnnnnnnnnnnnnnnnnnnnnnnnnnnnnnnnnnnnnnnnnnnnnnnnnnnnnnnnnnnnnnnnnnnnnnnnnnnnnnnnnnnnnnnnnnnnnnnnnnnnnnnnnnnnnnnnnnnnnnnnnnnnnnnnnnnnnnnnnnnnnnnnnnnnnnnnnnnnnnnnnnnnnnnnnnnnnnnnnnnnnnnnnnnnnnnnnnnnnnnnnnnnnnnnnnnnnnnnnnnnnnnnnnnnnnnnnnnnnnnnnnnnnnnnnnnnnnnnnnnnnnnnnnnnnnnnnnnnnnnnnnnnnnnnnnnnnnnnnnnnnnnnnnnnnnnnnnnnnnnnnnnnnnnnnnnnnnnnnnnnnnnnnnnnnnnnnnnnnnnnnnnnnnnnnnnnnnnnnnnnnnnnnnnnnnnnnnnnnnnnnnnnnnnnnnnnnnnnnnnnnnnnnnnnnnnnnnnnnnnnnnnnnnnnnnnnnnnnnnnnnnnnnnnnnnnnnnnnnnnnnnnnnnnnnnnnnnnnnnnnnnnnnnnnnnnnnnnnnnnnnnnnnnnnnnnnnnnnnnnnnnnnnnnnnnnnnnnnnnnnnnnnnnnnnnnnnnnnnnnnnnnnnnnnnnnnnnnnnnnnnnnnnnnnnnnnnnnnnnnnnnnnnnnnnnnnnnnnnnnnnnnnnnnnnnnnnnnnnnnnnnnnnnnnnnnnnnnnnnnnnnnnnnnnnnnnnnnnnnnnnnnnnnnnnnnnnnnnnnnnnnnnnnnnnnnnnnnnnnnnnnnnnnnnnnnnnnnnnnnnnnnnnnnnnnnnnnnnnnnnnnnnnnnnnnnnnnnnnnnnnnnnnnnnnnnnnnnnnnnnnnnnnnnnnnnnnnnnnnnnnnnnnnnnnnnnnnnnnnnnnnnnnnnnnnnnnnnnnnnnnnnnnnnnnnnnnnnnnnnnnnnnnnnnnnnnnnnnnnnnnnnnnnnnnnnnnnnnnnnnnnnnnnnnnnnnnnnnnnnnnnnnnnnnnnnnnnnnnnnnnnnnnnnnnnnnnnnnnnnnnnnnnnnnnnnnnnnnnnnnnnnnnnnnnnnnnnnnnnnnnnnnnnnnnnnnnnnnnnnnnnnnnnnnnnnnnnnnnnnnnnnnnnnnnnnnnnnnnnnnnnnnnnnnnnnnnnnnnnnnnnnnnnnnnnnnnnnnnnnnnnnnnnnnnnnnnnnnnnnnnnnnnnnnnnnnnnnnnnnnnnnnnnnnnnnnnnnnnnnnnnnnnnnnnnnnnnnnnnnnnnnnnnnnnnnnnnnnnnnnnnnnnnnnnnnnnnnnnnnnnnnnnnnnnnnnnnnnnnnnnnnnnnnnnnnnnnnnnnnnnnnnnnnnnnnnnnnnnnnnnnnnnnnnnnnnnnnnnnnnnnnnnnnnnnnnnnnnnnnnnnnnnnnnnnnnnnnnnnnnnnnnnnnnnnnnnnnnnnnnnnnnnnnnnnnnnnnnnnnnnnnnnnnnnnnnnnnnnnnnnnnnnnnnnnnnnnnnnnnnnnnnnnnnnnnnnnnnnnnnnnnnnnnnnnnnnnnnnnnnnnnnnnnnnnnnnnnnnnnnnnnnnnnnnnnnnnnnnnnnnnnnnnnnnnnnnnnnnnnnnnnnnnnnnnnnnnnnnnnnnnnnnnnnnnnnnnnnnnnnnnnnnnnnnnnnnnnnnnnnnnnnnnnnnnnnnnnnnnnnnnnnnnnnnnnnnnnnnnnnnnnnnnnnnnnnnnnnnnnnnnnnnnnnnnnnnnnnnnnnnnnnnnnnnnnnnnnnnnnnnnnnnnnnnnnnnnnnnnnnnnnnnnnnnnnnnnnnnnnnnnnnnnnnnnnnnnnnnnnnnnnnnnnnnnnnnnnnnnnnnnnnnnnnnnnnnnnnnnnnnnnnnnnnnnnnnnnnnnnnnnnnnnnnnnnnnnnnnnnnnnnnnnnnnnnnnnnnnnnnnnnnnnnnnnnnnnnnnnnnnnnnnnnnnnnnnnnnnnnnnnnnnnnnnnnnnnnnnnnnnnnnnnnnnnnnnnnnnnnnnnnnnnnnnnnnnnnnnnnnnnnnnnnnnnnnnnnnnnnnnnnnnnnnnnnnnnnnnnnnnnnnnnnnnnnnnnnnnnnnnnnnnnnnnnnnnnnnnnnnnnnnnnnnnnnnnnnnnnnnnnnnnnnnnnnnnnnnnnnnnnnnnnnnnnnnnnnnnnnnnnnnnnnnnnnnnnnnnnnnnnnnnnnnnnnnnnnnnnnnnnnnnnnnnnnnnnnnnnnnnnnnnnnnnnnnnnnnnnnnnnnnnnnnnnnnnnnnnnnnnnnnnnnnnnnnnnnnnnnnnnnnnnnnnnnnnnnnnnnnnnnnnnnnnnnnnnnnnnnnnnnnnnnnnnnnnnnnnnnnnnnnnnnnnnnnnnnnnnnnnnnnnnnnnnnnnnnnnnnnnnnnnnnnnnnnnnnnnnnnnnnnnnnnnnnnnnnnnnnnnnnnnnnnnnnnnnnnnnnnnnnnnnnnnnnnnnnnnnnnnnnnnnnnnnnnnnnnnnnnnnnnnnnnnnnnnnnnnnnnnnnnnnnnnnnnnnnnnnnnnnnnnnnnnnnnnnnnnnnnnnnnnnnnnnnnnnnnnnnnnnnnnnnnnnnnnnnnnnnnnnnnnnnnnnnnnnnnnnnnnnnnnnnnnnnnnnnnnnnnnnnnnnnnnnnnnnnnnnnnnnnnnnnnnnnnnnnnnnnnnnnnnnnnnnnnnnnnnnnnnnnnnnnnnnnnnnnnnnnnnnnnnnnnnnnnnnnnnnnnnnnnnnnnnnnnnnnnnnnnnnnnnnnnnnnnnnnnnnnnnnnnnnnnnnnnnnnnnnnnnnnnnnnnnnnnnnnnnnnnnnnnnnnnnnnnnnnnnnnnnnnnnnnnnnnnnnnnnnnnnnnnnnnnnnnnnnnnnnnnnnnnnnnnnnnnnnnnnnnnnnnnnnnnnnnnnnnnnnnnnnnnnnnnnnnnnnnnnnnnnnnnnnnnnnnnnnnnnnnnnnnnnnnnnnnnnnnnnnnnnnnnnnnnnnnnnnnnnnnnnnnnnnnnnnnnnnnnnnnnnnnnnnnnnnnnnnnnnnnnnnnnnnnnnnnnnnnnnnnnnnnnnnnnnnnnnnnnnnnnnnnnnnnnnnnnnnnnnnnnnnnnnnnnnnnnnnnnnnnnnnnnnnnnnnnnnnnnnnnnnnnnnnnnnnnnnnnnnnnnnnnnnnnnnnnnnnnnnnnnnnnnnnnnnnnnnnnnnnnnnnnnnnnnnnnnnnnnnnnnnnnnnnnnnnnnnnnnnnnnnnnnnnnnnnnnnnnnnnnnnnnnnnnnnnnnnnnnnnnnnnnnnnnnnnnnnnnnnnnnnnnnnnnnnnnnnnnnnnnnnnnnnnnnnnnnnnnnnnnnnnnnnnnnnnnnnnnnnnnnnnnnnnnnnnnnnnnnnnnnnnnnnnnnnnnnnnnnnnnnnnnnnnnnnnnnnnnnnnnnnnnnnnnnnnnnnnnnnnnnnnnnnnnnnnnnnnnnnnnnnnnnnnnnnnnnnnnnnnnnnnnnnnnnnnnnnnnnnnnnnnnnnnnnnnnnnnnnnnnnnnnnnnnnnnnnnnnnnnnnnnnnnnnnnnnnnnnnnnnnnnnnnnnnnnnnnnnnnnnnnnnnnnnnnnnnnnnnnnnnnnnnnnnnnnnnnnnnnnnnnnnnnnnnnnnnnnnnnnnnnnnnnnnnnnnnnnnnnnnnnnnnnnnnnnnnnnnnnnnnnnnnnnnnnnnnnnnnnnnnnnnnnnnnnnnnnnnnnnnnnnnnnnnnnnnnnnnnnnnnnnnnnnnnnnnnnnnnnnnnnnnnnnnnnnnnnnnnnnnnnnnnnnnnnnnnnnnnnnnnnnnnnnnnnnnnnnnnnnnnnnnnnnnnnnnnnnnnnnnnnnnnnnnnnnnnnnnnnnnnnnnnnnnnnnnnnnnnnnnnnnnnnnnnnnnnnnnnnnnnnnnnnnnnnnnnnnnnnnnnnnnnnnnnnnnnnnnnnnnnnnnnnnnnnnnnnnnnnnnnnnnnnnnnnnnnnnnnnnnnnnnnnnnnnnnnnnnnnnnnnnnnnnnnnnnnnnnnnnnnnnnnnnnnnnnnnnnnnnnnnnnnnnnnnnnnnnnnnnnnnnnnnnnnnnnnnnnnnnnnnnnnnnnnnnnnnnnnnnnnnnnnnnnnnnnnnnnnnnnnnnnnnnnnnnnnnnnnnnnnnnnnnnnnnnnnnnnnnnnnnnnnnnnnnnnnnnnnnnnnnnnnnnnnnnnnnnnnnnnnnnnnnnnnnnnnnnnnnnnnnnnnnnnnnnnnnnnnnnnnnnnnnnnnnnnnnnnnnnnnnnnnnnnnnnnnnnnnnnnnnnnnnnnnnnnnnnnnnnnnnnnnnnnnnnnnnnnnnnnnnnnnnnnnnnnnnnnnnnnnnnnnnnnnnnnnnnnnnnnnnnnnnnnnnnnnnnnnnnnnnnnnnnnnnnnnnnnnnnnnnnnnnnnnnnnnnnnnnnnnnnnnnnnnnnnnnnnnnnnnnnnnnnnnnnnnnnnnnnnnnnnnnnnnnnnnnnnnnnnnnnnnnnnnnnnnnnnnnnnnnnnnnnnnnnnnnnnnnnnnnnnnnnnnnnnnnnnnnnnnnnnnnnnnnnnnnnnnnnnnnnnnnnnnnnnnnnnnnnnnnnnnnnnnnnnnnnnnnnnnnnnnnnnnnnnnnnnnnnnnnnnnnnnnnnnnnnnnnnnnnnnnnnnnnnnnnnnnnnnnnnnnnnnnnnnnnnnnnnnnnnnnnnnnnnnnnnnnnnnnnnnnnnnnnnnnnnnnnnnnnnnnnnnnnnnnnnnnnnnnnnnnnnnnnnnnnnnnnnnnnnnnnnnnnnnnnnnnnnnnnnnnnnnnnnnnnnnnnnnnnnnnnnnnnnnnnnnnnnnnnnnnnnnnnnnnnnnnnnnnnnnnnnacttctgcctcccgggttcacgtcattctcctgcctcagcctcccaagtggctgggactacaggtgcccgccaccacacttggctaactttttgtatttttaatagcgatggggtttcactgtgttagccaggatggtctccatctcctgaccttgtgatctgcccacctcgggctttcaaagtgctgggattacaggcgtgagccactgtgccttgtctctttatatgtatttcaaaatgttctatttcatttcatgccagacttttgttgataagaaaaaaattgtattatgattaaaaaacaaaaaaggccgggagcggtggctcatgcctgtaatcccaggactttgggaggccgaggtgggcggatcacctaaggttgggagttcaagaccagcctgaccaacatggagaaaccccgtctctactaagaatacaaaattagccaggagtggtggtacatgcctgtaataccagctactccagaggctgaggcaggagaatggcttgaacccgggaggtggaggttgaggtgagccgagattgtgccattgcactccagcttgggtgacagagcaagactcagtctcaaaaaaaaaaaaaaaaaaaaaaaatgactgatccctgaatgctcagggagactgatttgagtaataataaaactcaggtctccagcacagccgcctccaggtgaattattctctatggcaattcccctgtcttggtaaatgagctgtctctaggccgcaggcaaggtgaacctgttgggcggttccactcttccttgggcccctcaagttccttggactttgtagggaggtttgcatacctgcccacctgggaacatccttcctcctattgtaactgcccaaggggttcacgttgcccgcagcctagacagagtcgatttatcaagacaggggaaaagcaataaagagtaattcacagggctgggcatggtgcctcacacctgtaatctcggcactttgggaggccaaggcgggcagatcacctgaagtcatgagttagagactagcctgaccaacatggagaaactccgtctctactaaaaaatttagccgggcatggtggcacatgcctgtaatcccagctactggggaggctgaggcaggagaattgcttgaacctgggaggtggaggttgcggtgagctgagattgagccactgcactccagcctgggcaagaaaagtgaaactccatctcaaagaagaagaaagaaaaacacacacacacacagtaatacacacagagctggctgtgccagagaccagagttttattattactcaaatcattctccccgaaaactcagggatcagagtttttaaggataatttggtgggtagggggccagtgaatcgggagtgctgactggttggctgggggatgaaatcacagagagttgaagctgttctcttctgctgagtcagttcctgggtgtgggggccacagacctggttgacaagtaaagatggggccatccggtttttagaaatgcaaaaacctgaagatccatttcgaaaggccaatcttaggttcacaatagtgaatgttgccttcgagaatgattgcagaagttgcaaatctgatgacctccagaataatggctggtaatatttagaattccagcccctcttattctaacttgatggctggtggcctttcgttcattttacaagaacagtttagcttttgggaagggctattatatttagtttaaactacaaactaaattccttcccgagactagttcggcctacatccgggaatggatgaggacagtttagacgttagaagcaagatggagttggttaggtatgatgtcattcactgtcataatttccttagttataattttgcaaaggtgatttcactgttctcgctccagggattgtggaaagggaaggtcaagtgtcagagaagagtctttcaggctagagtgaggcctctgttcttggagtgggtggttggagaccaggacagaggggtccccccgtttagacatggtcttgtagtgctggcctctggctaccctaagcacgaaaagcctcgcccccacttatcctcactggaggctcctcttccttcaatgctggggcgcctggctgggcgcagtggctcacgcctgtaatctcagcactttgggaggccgaggtggatggttcatgaggtcaggagttcgagcccagcctggccaacatggcaaaaccccatctctactaaaaatacaaaaattagccgggtgtggtggcaggcacctgtaattccagctactctggaggctgaggcagaagagtcacctggacccgggaggcagaggttacagtgagctgggactccgccattttactccagcctgggcgacagagtgagactctatctcaaaaaaaaaaaaaaaaatagactggggactctgaggaaggacatagttgaggacacaaaagcaactctctctcttttttttttttttttgagactgagtttcactcttgtcacccaggctggagtgcaatggcatgatcttggctcactgcaacctccgcctcaagggttcaagtgattctcctgcctcgccctcctgagtagctgggattacaggcacccaccaccacacctggctagtgtttgtattttttagagatgtagagatgggatttcaccagattggccgggctggtcccgaacccctgacctcgggtgatccacctgcctcagtctcccaaagtgttgaattacaggcatgagccaccacgcctggccaagcaactctcattttctgcatgtccttgaatttcaggcgtgaatactgcttctccaaagtcccctgaacacagcgacacaagtgtagtcacatgacttaggcctctaattctgccgtaactccttttcttttaaacattgattttttttttcttttatttttgagacaggttctcgcctgtcacccaggctggagtgcagtggcccggcccaatcttggctcactctgcaacctccacccccacagcctcaagggatcctcccacctcagcctcctgagtcccaaataactgggaccacaggcatctgccactttattttttttttgtatttggcttttttttttttttttttttgtatttttagtacagacagagtcttgctatgttgcccaggctggtctagaactcctcagctcaagattccacccacctcgacctctcaaagtgctgggattacaggcctgaaccactgtgcccggcctgcagcctggatttttaatgagatctcaggtcatttgtgtgcacactgaactttgataaactcttatttatttatttattgagagggagtcacactctgtcacccaggctggagtacagtggcgagatctccagctcactgtaacctctgcctcccaggttcaagcgattctcctccctcagcctccaagtagctccaagattacaggcgcacaccacgcccggctaatttttgtatttttttttagtagagacggcgtttcaccatgttggccaggctggtctgaaactcatgacctcaagttatctgaccaccttggcctcccagagtgctgggattacaggtgtgagccattgtgcccagcccaagaagctctgatttaaaatgtagtactcaataaattgatgaagaaggtagttgaaacatctctgtgacagtttagagtttaaaatatttccatatttgttatttcattttatctttttttgttttgttttatttttttgaaacaatcttgctctttgcccaggctggagtgcagtgatgtgatctcggctcactgcacctcggcctcccaaagtgctgggagcatgagccacagtgcctggccgggagtgctgtctttttattaactcctgtatgtccttagttaccagcatagccttttgttatagcagagtagcccgccttacagatagaaaggtcttccagtgttccacagagtataatgttgtccaggggctttgcccgaacaattctgaaacatggacattcaagttgcaatgtatgtgaatgagtcatagttttctttccaatgcacagggcttcagtgttctacttggtcacttggtctaaagatctctgaggcatgttctgtctgcaacgtacttgcccagcatctcccgggtggctccacttctaaaatggataacactttctttactggccaggtttttatttaaaaaaaaaaaatcaaaaaagtagacaagccactagtgaatctaatcaattcaaaaggaagaaaacacaaatatgtaaaataagacatctttggggggggaagatctgaaaagggggaaaaatttaaaagtcacaagctgattttcccaattttaagcaaatacatgtgagaatctagataaaatggataactcagaaaatacaacctatcaaaattgacctgagcgacattaaaaaatagagaataggaaaaaagtagtagagcactgctactgaatgcaccaagccaggctggtggattctaccaaactttaaagatcagtcaatcccaatattacttaaataagttcagagcactagaaacaaataaaaacaaaaagcttccaaatcgattcttatgaaataagtataatgtattttccaaaacctgatattgcatcaagaactttagatttatgaatattgagatatataccttaaataaaatattggcaagcaatccaaatgaacattataaaaaaaagtccatcataattcagagagttttattccaagaatacacattttgttccatttttaatgtaattcatcacattaatacagctaatgagaagaattacataattatcttcataaatgcacagaaggactttgacaaaattagtactaattcatgttgaaaaacacaacaaaaagaaatttatggatttcctctacacataaaatatacactttaactcaaaagcttgcattttactgaagggaaacattaaggctttgtcaccaaaatcaggaacaagacaaggatgcctactatctcattacattgaacatcgggatggaggtgttagctaatgcagttagagaagagaaagcaattcgagacactggaattgaaaagtaaataaaaataatctttattttcagatgcagttgttatttatctgaaaaaccccaaagtatcaatggagaaatgactacaaataatgaaagaatttagtaaaatagtaggaaataaaattaatatattaaaaaatcaatagcttttgtgtacagagacaaaaaacagagagaagctaaaatggaagggacaatccaatatatggcagcaaaatgataataaaatatttaagtgtacattttgcacaagtgtccaagatttatatgaggaaaactcacaaaacactacggaagaaaacaaaattgaacaaatgtaaaggaaatcatgtccttggatagaaaaacttaacatcactagaatgttgtttagtcttccaaggttaacttatacatttaacaaaatcccaataacaatgtcctaaatatcttctggacagacaggccagttagaaagttcacttgaaaggataaatgagagagaatagttacaaaacgtatggggaatagaaaagccaaaagtgttgggtgtgggtaggattagctctaccagatattaaaacttacttgtaaaaatctttataattaaagtaggatggtattgatgcatgaataaaaagacaatgtaacagagttgaaaatcagaaatagacctcattatatatacaaatttagtatgctatggaagccgcactcaaaatcagtgaggatataggatggaattattaataagaggattaggattatcgtagagccatatggaaaaaattaaatgagattgatatcttataccactcaacaggataaattccaagtggatcagatatttatagacaatgtaactatacaagtaataaaataagacaacatggatgaatacctgtataatctttgagcagaaaaaactttctaactatgatttaacacccagaaacatgttataagggaaacagtactgctaaaaaaataacttgcatggaaaaggaaatcatagatacaataaaaagacaaaatgacaagctggatttacatggccaggtaatatatacacctcgactgagtgattaaataagttatttactgatgaggaaattggtagctttaacaagggccattttgggagcatgtgcgaggacaaatcctaattggaatggactgaggatgagtgggaaatgaggaaatagaggttgttggtgtccacaatacctctaagaagttaggtagagagggagaaggtagggtagagttgaagtgggggaggaggggcaggactaatagagtggaactgacttgaggctggtcgcacaggtgagggcttacctgtgtgatttgcatcaaaggtgattttctcctacctttgtgaagttctgagaaattataaaaatcacccaagttactactgaaaaagagatcaagatcagcagcattttttgaagcatcgtgtttgaggacatgacaaatgtcctaggagagatgacacaagagaggagtcatgaggagtgaatctctctgtactcactcattattttatttctaacttgtaattagcctccaaaattgtgttcttcttttgtgagtcactctcttctttccctctgttcactaacaactcataccctcaatccctttgtctacctattgggtgcttcttgtccaagtttcacttaggattgttgcttcctccttccaggaccctgaagtgaagtcaaagttacctcataggttctcttaatgccctctgtattttcttagttacaacacataacaattacaatgacaagcagaaaaattaattcatcagcgtgtcttttgggggaagactagggatagtggatggaaccacagaaatatgctcgtattacaaaacataatctgtaaaatacctttaaagaaagccagtcctgttaactggacagggaggtgggatgggtagcttttgttttgctgaatgccaactctgaaatttagaaacagaaactccttcaggaatgaattactctgcgtaataaacaagagatgatccaataaggctgggcactgcgtgaggaacgggaaaaaggagatagaaagggacggtgagggagagagacggggatagagagagagagaagctcgtccacaccatgcccctgttagtaccatcatggagatcagaaataaaattatatgctttaaatagcttattttgggaaacaaaatgtaaagccttgcctcttggtcccttaccaaatcctcagtgaagtctcaattgtgtgaaagcttttgtgtgagtggattcattttgtggaatccaaaaaggttctatgttttgaatctggtatgtgcagagcaaaattagatacttcacatgcaaaatggaagggagagaacaaaggatcactttagagctggttaacctttgggaagtccaagatgaaattactttaaacaagatgtagtacacagttgcagctcatattgaatcaccacattctgattgatctacgactccccagttactgaagcgtggtgtgggagaacctgtagaggtgttgagtgttgagaccgaatgaatgcaggagagaagagaagggccagctctaatgtgtgtcacacactatattgcaatagattgtttactttttaatttcccaaagactgtcaattactgaagaattggaataatgtctgtcacagcattataggcccagggcctagcatggtgcctgacaagcacaatatttgttgaataaataatttcaaaacagaatcctgatttttagaatgacttcaacttctatccactgaaatatcatattttctcaaaaagcacattcaatagggcaaaaaaaaaaaaaaaaatcagtcaaggggctactctgacccctcctgcccccgagactgacccaggttttctgacttcaaagtgaatttcataaagtatgagttataatgtctcatctgattcatttttccttgcccagaaagtagtgtgtatggatacgtttcagcagcatttgaaaaaaaaagtatggttgccattgcacttctgtaaatcttagattctcacctccttgtcatagatctttaaacttatcctgtaaagtactgggtacttacccaatagcgtcagtaccatggaatgcactgaagataaagagaagcagcaaaacgaatgaataaacatgtatgttggataagaatacagtagtagaaataccaaattcttgttgatctctgaagaaaccttgttcttctaagctcctgagtctttgcccaagctgttctgcctgaaattcttattacctcctccctcactgcaccaacactgctcaatctccaccatgcttcctggtaaacttggaaaattcctattcattgtttgggtttgagctttaatgccaactgttctttcctcaatcattttcattgataatttattcctttgtgctcttatagtctcgtatgcatacctttgtaataatatgtgctacactgttgtatctccttatgtgtctgtgccttcattagattgatggatattctagaggagagtccctcgaaaactccctcattcgagaggagaatcacctcaggctgaatccacctaccttggattgctgatatgtcacaagattctggtcctgacaaccaagcagttctgtggctcctatccctggtctgacatttccgctgatgcactaccaactttggttagaattggctcgtttgagagtggccagagagcttctttgccagaaagaattttattgatggcagagttttgggatttatttaccgcatcctctatatcatacttatttttgcatctattttctacttgcaacccttaatcaagatcacatttgtctaagccgtaagtaactgcaaatcagaattcttcttagaaccctatggccagataatctcatttattctgaaatcaatgtctcacctagattctactccttagcttgggctctgcatatctcagtgtcttcaaaatgtttccacttggaaatcctcactggtagaggtgagctgaacccagcctgtgctagcttatgaaagcctattcatgcacatttctttccaactgcttatttggtgacatcatcttggtagcttgaaataggccatcacgggtacatttgcatcatggaaatcatcaaaggctgtaaacaggattttttgtttttgttttctgggagagcaggtttgtctgcatacccctgctcataggaatctcaaagtcagcttgttcaattggaatgttttttcttcttccaaatgtcttctgcttcttcttctccctgtctgtgaatggtatcccaaatgagaaacttggccactgtcttagtcacttgtctcctctccttatgcttctatatggtcatcctcagacaggattgaatcaatgtacagagcccgttagttgtctctgtcatcagttgtacatatacaacatttaaaaacagtttctggcacttagtttaagcactaagtaattagcaactattaccgtcaccaccccaactactactatttatgcatgggagtaaattttgagattggcttttttctcccactcagcgtaatgtccatgatgtccatccaagttttggcatgcgtcagcagttcatgtcgacatattgcctcactcacaattaggcaatattgtttgttatcttggtttctttaactaatattgtttctaaaacctactcctcacttcttgatttgtttcttatcttgtaaagtctttggcagctctttcagaggggaccaatattagactgagtacatattttttcttcctaaatagatgatacatttacttgctatagaattaggtgaaaactatttttcttcttagccttgaggatactgtttcattctcttcatgcatccaatgtcattgatgaaatgtctgatgtcaaagttagtataattgtggatctttgtagcatttttctctccatccttggtattatgaaattttatgcagatctttttatcttcatcatgcttggcaacttttaatggcccattagacctgagatctaatatctgttaacttttctttcataattttgatcacactttcctgttattctatattctgcaggaattcttgagttaacattttatctctccagtttgttttcgttttgatctttagtgtgtccctcatgtttttctttatttcacatatcacattttaaatttaacaaatatctagttaactctaagtatggctgcaatatcctctcgcatcactctggtaattaaacacacttattctaaattcttgtatcaactgtccttttaactttgttttcttggcatgccagtttcttctgattattgtgctttgtgcctctctttcaggtattagtctctttcaaatgattggtaatttttggttatgtgttcacctttgcatttgaaattttctgctagcctccctgtaaatgttgggtttatttattgcaattttcttctgggagaggggttagaaatatttcctggtgctgagtgccaatatccattcttctgagagtgcgtgctctcttcttccctcttggggattacgcacagcactgctctgtcttcccaacccttgcacacattctcagtgcttccatatgatatgtggagaggtcattcctcatggctctctctgtcaaactctgtgtccacctttactgatttcagtaagagtcataggaaaagacagaaatactattattttacatatttctcatcaggatatccaacaagttctctttgatatcaaacataaaacctgggactatttaattatgccattttcctagatccaaaaataatcatatatctctacttaattgaaaaaaacaatgttcctctagtaggagacccaatatatgctttgagcatcttgagtgccaattgccttgcatgtgtgctgtgtttaatcgtgtgaggttgtttttcttccccatgttcactaatggggcatctgaggctcagagagcttaattgtcctatgagtaaaagctgtgtatacacggagacacatatactgggggaagaagccaggtctgcctcccctcaatggccatgccatctattctgcctctaggcctctaaactaactgcagggactttcttctttcataaggtgttttcattaatattttttatcattgtcattacgttatctgtgcatattttcttttatgttcttttgggttttttttgagacggagtctcgctctgtcgcccaggctggagtgcagtggcacgatcttggctcactgcaagctctgcttcctgggttcatgccattctcctgcctcagcctcccgagtagctgggactacaggctcccgccactgcgcccggctaaatttttgtgtttttagtagagatggggtttcatcgtgttaaccaggatggtctccatctcctgacctcgtgatccgcccgccttggcctaccaaagtgctgggactacaggcgtgagccaccgcgcccggccctcttttatgttctgtagtaaataaagatgaccgattcctgaacattgagaagaggctaaatatgtaaatatttaggaagagtgaaaaaaaaatgtgccccagcctcttctcaatgtcattataaactatcttggcagaggttgatatccaaggaataatttctctcccaaattatgccaatcagaatttcactcgaccataattcttttaaccagtttcagaggaataataaattacaaaattgttcaaggtacttgtagttcaagtacattttgacaggtgtaaaactgtagacacactgatacaaacatattctaattgacttaaaagtatatgggacctatttcaaaatctagattttaaaatgtcgtgtcaacatacccatgttctccttgtgaaataattgctttttattctctggatagaataatttaatctttaaaccttcaattcagttaaaaacaaaatattacataaggatatgcttataaaaatatttcacaactagcttttcaattcagaaatatatgtgaaaaatcatcaagcgtctaatggatttcaaggagaaatgggttagtaatttattccatatgtctcaatttttcctagacacaaggcttcctttaaaataattgtaggcgtttaagaaaccatgtaaactaaaaagaagaaattgtgacactgccacttaggttttttaaatctttggacatgaatcaatatatttttaaattttatcttaattagacatggtgagttcaccatcttcctgtcagtatagcatccaagctgattatcatagattacaagttcaactatcaactgtgttctgagagtctaaaaaaattaatgaattatttgtttgggtattcttaaagcaggagtgaggacacagcgaaagtgagacaagcaagagagaacaaactaaaacaggaaagatagaaaagccaataccacacgtgttaagaggcaagttcctgtgttagatatctgggcttaattctatgggaagctatgtggagcatgcctcagaattacatcactgaatccagggagattcttcttagttaccctcaccttttcttcccacttcatccccagtatcaagctcccgtgctgctagacaaagtcctcagctagaaacaggtgcaaattctggagatgagaccttgtagagtgttaagaatggttttcttcccagcagctacaggtaaggaataggggctgggctatttatacatctgctacaaatcactaaagcccttatgctccttttggtgatcgagaatgtatttaaaaatattagatgatgaagaagggctgcagaaaggaggaaacagaaacaaacagcacacttcttggtttatttttattcatttcatcagtttcaaggaaaatgtgttgggagttcctggcatagagaatgttacaaagacatgttttcaatactggtgctatccccagggcagagaagacccagagaatgcccaagtggctgctggaacaaagtcagacaccgtgccacctgtccacactcgttggctctgccaccttgctgaagatcggtttaaaggactggcttctctccccccaaaattaaaagagcacaaactgagaaactgaatgtaggagacagcagtggattatgctgttctcgggggtcacctcaggtttggaagcattctttcaaattaacccatctcaggccatctgcagaggagaaaggtggtacctaactttttttcttgtcagcacttggtaggggtgtttattgaccaaatatgttcccacaacctagttttttgtaactaaatatagtagatttttaaattttatcatcaaattctatggacaatttttgattaaaatagactccacatctatgtcatgttttcttcttattattaattacattgctgtatcaaagaacaagacttcagaatcaagaatatcttgtctcttggcattgaatttatacaaggtgctctttctttaatggtgtctcaaaggacatatttttactcattaaaaaggaagatcggaatctagttgtatgcactgctccaacatactaataattaaaattaggaggtaaatgtggtcaaagctagagaaagacttgagatgccatttatagtgattgctgtatagcactctacaaacagaaattgttaaataatagtttaaagaaatattttgtagcatttcaaatatttgagtgcctgaagtttctcctcttatatagttcagattatcaatttgaagacttactccactagttaatatgtttttagtcgcgtttgagtattatataaaaggaattttcagttaaatgtgttccgcttacataaaacattacaaattagtgaggatttaattacattttcatgttcctgtaatgtctttagaatattttcatattattaactatcaatatatgtatgctttgtcaaagaaaaatcaaacatatatatcattgaaattgaaaaattttaaaagtacttattaattctattgaaaaaccaaatctgtaggaacaattacaatataatattgtgaacatgtaaatatacattcgatgtctattttatatataagcatatatgattaaaaatacagttaagaatttttaaacctagtattataaagtaaaaattagttaacttctgatgattatttgttaattaagatataattattttgatttgggtgattttaaataaacaaaaatattaaattacatgacaaaaattccttataaaatgtttatgatttttacattggttttatcactttatccactattttattttaagatgacctgccttttttaaaacactgtattcatcttaattaatttaaattccatttgtcaaaaaattaacaaatgatttgctgtattatacagtgcggttataaactgagtcagtatctcaagatttgatccccattatcgtcatctgtggctctatttgttttataaatgtattgtctttttccatgcctgtcacatcgctattgctcactcatttttctctttgtcccttatagggagcattgcctatctctagattaagcaaaagttgcatcttaaaaaagcacaataacctgctcaatctttctcacacaaacaaatgtttgtcaagaaattaaagtgtagatgatgatacaaagagcttgattaaattagatgccacagtacccttgtgattcagaatatgaatgttatttaatttctttgaaaccaataattgctgattgacattaattaatgccaatatttcagaagttgtcctagttagtgaaatatatacaacatgcaaaagattcagaactctgaaaggcaagattattctataattaagaattaagaattaattcacattaattattggggagaaataattattaagaattaattactgagacaatgtttttattttttatttagaaaattattttgtgcatgagcattactgcaagttttgcaagaaacatcaatttaaagaaataattatgtgcaaaagatgaatttaataacatcttgatattttccacgattagagttttatttggtaaatcttcaaatgcacatcaactaaagataataaatgaatcttggaaatcctgtaggtaagggtaaacagtaggatgcatccaattgcatttacacgcacatacaattacatttacacccatacatgcacacacactcactgatacacgtgtgtatatatatatacatgaatttactaattgattttaactaatatttataagagccagttggattgagatatattgttgaacctgaaaaatatttattatatacgtgtttaaaatacacaaagaaataaatagtaattgcactaggcatttgaaactgtactaaaatataagctgtgaacattttgtgatcgttacaaattcttacactgaataaatatttttatttttataatattatctttgatacatgtgtacattttttacaatgtgttattttatttttgtcatagagtcatgtcatgcataataacatttcaaagacggattacatatacaaaagtggtcccatgagattttaatacatatttttacatacttttctatgtttaagtatgtttagatacataaactcttaccactgtgttcttattgcctgtggtattcagtacagtaatgtagtacacaggtttgtagcctaggagagagaggatctaccatataacctagatgtggtaggctgtacaatctaggtgtttgtaatattctctgtgatgtttacaaaacgatgaaattgcctatggatgcacctgttagaacgtatccctatcattcagtaatgtgtgactgtactaaaatgctcaatctaattttcagtgccctccataaaattgttgtactgtgaaatacaaatctctcacccatggcctgaatatgtttcaaacctagcagatcatgggaaggagaatgtgctggcatcgctgggatgattttctcacactacatgaataatatctccagacttcgcgaatatgagccacttgcataaagtaggcatctctttgctgggaaatttatcaaatgggagtgtgaagtgtttttaaaagatacttgtttgtttgtagctggtaggcctacagtggctcatggcaatggttgaggttgctaagatttggtggagggaggcaaaatgaaatggccacttatatggtatatggatcacttgtttctgttgagttacagactcagctggctatttctcccaatgttagttatttggagaaaaaaacatgatggtaattttggggtaacaaatacaatatttgatgaaagcaaatttattgagggttacacaaactacaggatactttaggctgcaaagtcaacacgagacttctggcccaaattgtgcagagtttgggtccagctgcaaagttcaaaggaagaggccatataagacgattctcacttttgacaccaactgccgttcaggggtttccccagaacaccctcagtttcaagtatttactagaaagactcacagaactcattgaatgccattgtactcatggtttataatagagaaagggtagaaattaggacgaattgaagagacatatcatataaggtggaatctaggagattttgaatgttaagtttccattgtcttcaggacatattacctgtcattgttgtacagcaataaacatggagtactaccaacctggggagctcacctgatgctaaaaagacacgatttagaaaatgaaaagacaaaggaaaggatgagataagatgaccttccacattaaggcactggaaaaaatagcaaactaaacctaaagcaagcagaaggaagaaaataaaaattagataaattaataatttataatattaatcatatttgttagtactgactaattgatattaattcttgactaacttttttaaaaagagaaatattcacttcccaatttattctgttgggccagtgttaccttgatacaaaagttagtgcaaatagcatagaaaaataaaactactgtaagtataaacgcagaattccttaaaaaatactaacaaatcaaatctagcaacatataaaagaattatacactatgacaaagtgaaatttatactagtaatcccaggttggtttaacagcccaaaatccattaaggtaatacatcttacccatagaataagaaacgagaattgcatgatcatctcgatagattcagaaaagacatttaacaaaatccaaatgctttaatgattacaaataaaaataaaaactcaatgaaccaggaatagagaactttctacacccgatacatggcacccgtgaaaagctaacagcaaacattcaacttagtggtgaaagaaaggatactttcccgctatggtcagagataagaataagatatatactttgacctcttctagtcaacactatactaaagattttatgcagggcaaatcggcaagtaaagaaataagagtcacccatattgaacaggaagaaataaaactttttttgcaaataacattcttgtatatagaaaattttaaggaatccactgaacgatagaactagtaaattatttcagcaatattacagcatagaagatatacaaaaatcaattgcacacatctacaatgaaaaccccaaaatgaagttaagaaaacacttcaatgtacaatagcatcaaaaaaagaaataataattaatttggaaaatgtgatacaagattttactctgaaaattaaaaattattgtttaaagaagatctagataattagcaaacatcttacagccatgaattggaagatttaacattgtactactttacaattagaactacagatttgacgaaatccctgcaagtatcccaacagacttctgtctagaaactgacaagctgattctgaaatacacatggaattgtaagggactcaaaatagccaaaatagtcttgaaaaaaagaaaacgtattaggataattcacacctccgtgctccaaaccttacggcaaagcatcagtaatcaagacaacataatactgatgaaggaaaaatatatagactgatggaagagagttgagagtccatatataaaactgtgtatctatagtcaatggattcttacagtggtgccatgtgcaattcaatgaggaagagacagtctttgaacacactgggtcaacaacgtatacgtggatcaccacttgcaaaataataaattcgaacccttaccccaaagcatacaaaaatattaactcaaatgaactaaagacatacatgcagagctagaataaagcatatgggaaaatcttcaggatttttgatctagcaaagaaatagctgtaacaccaaaaacatgagcaaaaaaataaaaattagatatttaaaatttcttaaaaattaaagacattggtgtttcaaaggacaaccaagaaagtcaaaaggcagctcaaaaattgtgagaagatatttgaaaaacacatatctatatgtctgtatatatatgtatcttgaatatagaaaaattgttttaactcagtaacaaatatcccaactcaaaactgataaatgctaggaaagatgtgtttcccaagaagatacacgaacggtcaataatcccataaaaagattctcaatagcagcactcatcaggcaactataaatcaaaaccacagttagatactctatggccagaactggccactttggaaaatagtttgatggcttctaaatatattaaacatagaattgtcatatgtcccagaaatttattcccagttatacactcagagtattggaaagaggtgttcaaacacaaattgtacacaagtatttttagcagcagtatttacaatagccaaaggctgaacacaactcaaatgtcaataaaaatgttattggataaacaaaatgttatatccatgcaattgaatgttatacagttataaaaagaaataaagtaccaatacgcacatgaaccttgatagcattatgccaactgaaagaagccaggcacaaaaggccacctattgtatgattctatttagatgaaaatagaataggaaaatctacagagacaggaaacagatttgtggttgcttaggattgaggaggggatgggtgcataggaggttaacagctaaagaaggtggggtttctttttgaagtgatgaaaatgctctaaaattcattgtgatgatggctccacttatctgtgcatatactataaaagccactgacttgtagacattcgatgtgtgcactctatactatgtaaactatatctcaataaatcctttcaaaaatacacagaagagtaaggggttttggactgttgcagctgggaggcagtttgaaatactgaataggtctcatcgagaatgtgaggtttcagtaaagacttgaggaagttgaatgagctgatcaatggatatatggagggctatatttccaagccaagaaattaactagagtcttggtcatgagacagcagcatgttggcacgtccagaggacagtgaggtggccagggccactggtaagatcaagggcgaagatataaaataattttggcggttaacatgcgacagatcatgatgggcttgcagaccattgtaagaattgtggctttagtgtaaatgaaatggggagacaaatcattaccgcattatcaatattttaataaattggatccatgaaccaaatccaatgagattaaatcaattagtaatatgcaaatttgtattaaaattacaagaattacttgcacatttgagaacagaagagttatgattgtttatcagcaataataaacattattaattttaattgtgatcagctagttgagattaattgcaatacatcatgctttataatgtgactgtcaaaaggaaaatatgattgtaaccttatactacatctatcaatgtctttgattcataggactatagagtaagcccctagttttcaaagccaacttatgaggcagtgacatcttaggcaagtttgctgctttctgccacagtggtccttggtcagctggcacaaattgttttacaaacaccagtcggtctaaaaaaagtttggatcacaatgaatacagaaacatcttcatcccttcagaaatacctatgaattacttccaatacagaatgaaaaattgacaacggaaatatgttgattgtaaaaatgccagttagcttgcatctacatgaaagaaaaatgccatttttattaccttagatcattgttttacatgagttttggtatagcacaatgttgaaccaagggcaaagagagatgaattaatgaagtcttaagatatcaagaatttgaaagaaaaggaaagtcatctttgaaggttagtgacatagcattcatcttctcttgtcaccttttccatgattccctgtatgcctgatggacagctttcactcaagttcagagaacagcatgcaaagattagctaccaattatctttatgaagtgagcttaatttctagccagactgagcttacattttagcaggaagcatttttgggaaatgtttatgttagagtttgcccttcttgacaaggtgagacataaatgtctaccttacagacatgaattaagatgggaatatatttgggggaaacattttctcaaatgctaaataacaaagttacacaaaggggaaattatactagatttctttcccgcttgttttctatgtctcatgcaattaaccttgattcccttcagtttctgtttaatgtagaaagtggcattttcattattttaagcttctagcacaacgaaagaatttctgtttttcatgaactgcatcataaatgaaagggaggaagagtgtcctatatcatatttattgttaaagaaaacactgctccacggcttaaattccgttttaaaaagagaatttattgaacatctaacacatacataaaaggcagtaaagacaaatgagaagggggcaggttattgaagtatacagactttaatgctgagttttgtattttaggaagttactccaccttacagaggctcaatttcccctgatttaggaaggcgatgctaatgggtattgcattaggtgtaagtataaaaatgttgtatttaagagaatcccacaagcttggtataaggcagaaaataaatagatgtgacattaataagtagtttattacatttgtatgctacctgaagactagaggcagcaagaaacacagccactatgcttgattagcattatattctaatttggaatataagtagaaaagagaagaatagaaagctatgcataaacacatgcattaaaatgaattttatgtggactctttcatgaaaatgttcctaaggtattttattttttattgtggtaaaatacacataacataaaatgtactcttaaccattttaagtgtacagttcagtggtactagagtcataacattgtgcagccatccctaccatccatctccataactcgtttcatcttgtgaaactgaaactctatacccattaaacagtacttccccatgccttcctccccccagcttctggcaaccatcattgtactatctctatgattctgtccactttaagtcccttatacaaatggaattatacggtatttgtccttcactgactaacttatttcacttggcataatatcctcaagtttcatccaagttgcaacatatgtcagaatatttccctcatgtttaaggctgaataatattccattgtatgtatatatcatattgtgcttatccattcatctgttgttggacacttcaattgctactacgttttagctattgccaataatgctggtgcaaacatggatgtgcaaatattttttcaagactctgctttcaattcttttgctatcctgagatgtggcgctgctcaatcatatggcaataccattttgatgttttgaggaactaccatactcttttccacagcaaacatagggtttggcattccctccaaaactgcaaaaggaatcgccacatccttgcctgtggattttattcagaagtcctgtggctctctctacatcccggccaccatgtgttatttcctatttatatatatgacatcaaaggtgcaggaagtaatgaactaaattggaaggataaacatgtagaaaaatagaggtaaatactgactacataaaaccataacagtaagaattttggatgatctattatatacctatttatctaacatctatctgttcctccatctgtaattaagatatattacagttagagaacggagaaaaaagtatgaatacatgaatttaaattttaattcttcttagattatctcacagcatcattatatgaaagaaaatttataggtcaatatctgttaactataaatgtaacattcttaaagtattcaaacacattgaattacagtatgaataatatattacaatccattcaagtttattttattccaggaacacaaaaatacagatttcatttgcaattcaaaaaatcagaaatcgatacatgattgatgtacatacacatttaatgtatttttaaatatacatttttaaaaaatagacatttttctagaacaaatacttaaaatatcactgaaaatagtgttattagctaataccttcttaataactctggtattacataagacatcaaaattaaaatttcagataagcttagaaactaaaaattttaaaaatactattctgttctccatatgttcatatttaatattatttcttgttttcattcttcttcagtgttggtctactaaaatataacatacaatacttacttttgatttctgttattactcaaaattgtatacattttctcatgctcttaatttagatatgctacttttctgtactcttggaattttcacatttgtgttcactctcttttgagttcccatagtagcaaataagcttttttccctctttctgatttgaaggttcatcttctcataattattttgtccactcagtttcttttcattctcagttaagtgcctctcatctggcttcttttcatttataaggtttcctttcatcttgagccagtcttttatttatattttgattctgttttgtggaggacatgcttccctgaattttaaggaagaggccaaaaggtttgttcaagtttttacctgatacattggattaaattatctaatgtacacactcttaatttaagtcagggggcgactgtctactcttgattttatatagtattatttttcttaacatccaagtccatcttcatctatttgtatatgatcaataaaaatatatttgtccagaaccctgctttggtggagttacttctttctaagtagtagaggtagcagttgagacatgagctgggttctgggtcagtttagcgggctgggcgacattcctccttttggtctgtatgactgaatgaatgcagttcctgctgtctcactcctctccttaacacattgagccattgcagcagatgagaaggaataatcttgatctgccattcaggtggaacacatgttctctccagccacacccataggttgtactcacactcggccagaaggtatcctgtcaatgatggagatgtatctatatatctagatagatatctactttgttttatgctctctggttgcccataaattatctccttaaagtgaatatcaaaagagagcttggtgatggcagtgttataaaatcctcaaaatgcagtacccacacccagaggaatttgtagattctggcattctaattcagataccaaactatataaaaggggaattggtcattgagggttgctaggctctttgttgagcatatttgatcttttcatgactttgaaattattttaaaaatctaacctttttctcagtgtgctgcaagatgatttgattttaatgcataagcactaattctcccctaagatttgtacaatatatttgctctgacaagccatagccagcaactcacttcacagcaatttatagcatttccaccacaagttgaattatttttaactagactctctttgccttaataaaagtatgaagaagcaatatacttgttctaattaggttcaaaagttggcagtctctctcctggaaagaataataaaacttttcagcggcctaatatgcatctatagacacacacacacacacacacacacacacacacacacacacacgcaagcactattcataatatttaaagcacattctgttctataacttcatttgtctagcacaaaataaaacgatctcagtatatgtcaagtaccaattttttcgtatggccaattatagacattttattttttaaagattagagtgttcttgaagctctatttctttgtcaaagaactaaacattggcaaatatgtagggtttcccacataaaaacattattaacatcaaaatagaaagctggttgtagaaataatgattgggaacacagagtctctactcaacgttctacttctgccgtaccataactttgtgatctcaggaaatatctctccatgttgtcatctctatgtatagttctgtcatttttcaataagagctttttgcttaattatgaagtactagttactataaccattattttgagcttcatgtaaatcaggaacacatggactccacttgcaaaacattgaaaatgtagttagggattgcgggcataaagcaacattttaaaatgtgcaaagacaatgagtaagcaacaaagtgtccaattttttaggggaaagttgcataggtcaggaaaaggcaggattaagtaacagagaatttgaatgataactggccaattggtgtcatttacaattgcaagtcatacaaatgaagtttgcttttttaaagagaaaaggagttacttagaatgggtcaacctattggggaagcaatgtagttagagacaatgcccaaaaccatgtgagcaaatgctctgtagagcccacccctgaaatgctgccattgtgaggccaagtctctccttgtcttggtactgagccctccattctgcttccatcattgccactgcagctgccataaaatgatccctcaaccaccgctgcccaggaacaaagaaagaattctgtccttccgcgctctcagatcaatttccaacatcaggtgagcctttgatgggcactattcagttcctatatccatgacatagatgcagtaaaaacatagaaattgcctatgtgtttcccaataagacacatatggaagcctgttttcccacaacaggaaggggtttgcacgatgggtgttcaaaggaacaatattccatgtaaaccatactttgcccatatgaagaaaagcaacaaggattatttagtaaatagacatggaacctcatccaatgttggctgatgagaagctggttagcaagggggtctgccttcagttaggacaaggtctgtgcttcccacgggatctctccacagcaggagggatgtaaacttccctttctacccttgcacctatcctcaaatggcccagaggtcttcaggttctagcatttctcaattaatgctgcacaaaataacagacagccttgactgtcacagtctgttctcatgaagctagtctctgctcactacataaaacaggagagtaagaacaagggtgtttaacgctaccctagctcaaacatgtttctctctgtgggatgccaagaacctgggagccagtgcatctgctgctttcccttctcggattctcgcacagacaaaagaggcaaggggcatttcttcagaggccttgagtttcactatacaatgacccagactctacatgcaccctctttatatatttctaccttgaaaaaaaattttatataatattaatatatatttttatataacaaacacatgtttattttatagatagatatagatatacatagataaagatctctagtcagccttttttaaggctgggctgatcgcagtgcctcaaaactataatcccagcactttgggaggccaaggtggccagatctcttgagtccaggagatggagatcagccagggcaacatggtgaaaccccatctttacaaaaattagctagtatggtgtcatgcacctgcagtccctgctactcaggaggctgagttgggagaatcgcttgagcacagtatgtgaaggcttcagtgagctctgatcacatgactgcactccatcttgggtgacaaagtgagaccctctctcaaaataaaataaaataaaaagcctaccaccatactcacagataagtgtgtcaggtatatttgcagctatctttcctatattctatttggtaaaaaaaaaattgcaaagaactcttctcattctagatttttgtattaattagacacttgaaggttatagcagaagatctataatcatgttttgtgtgtgtactctatagaccagatagtgcaaacagatatcaatgctttttaaaagtatataaggttattagaaatattttaaactacctataggtatatatgtatctaattgagctatcaaatgcaagtaaaatcatttccttagcgtgtgaaatccactcaatttattaaaatattttctaatatctattacaatatttaattagctaacataagaggagttttaagacatttatttatatgtacttactagattcaaactcgattccactattttcagaaattatgctgagacaaatcctttttttatctatgtttctgcccatattaaaagacagatatgtcaattttgctaatcatgctgttctaaacctctccatcctgattatttttcggtttgttctaccagtcattcagagacttacttatattcaaatttctctctaggtttaacatttgtgtatgtcttcttgtggttttgtctatttttgctgtatataatttatttcattgacatatatcatacatgcagaaaagtacaatgattaaatatggatagcttaacacatgtatttgcttagaaccatgtatgaaaatagaacagtactaaaaatagtgatacttgtcctgcccctttccaaacactaaccctcatcctcaatagtaacagatttttttttttttatcataatttggtctattttcaaatttttattaaataaatcagagtatctactctatgtttctttcattgttgttattttgcttatagtatttatctgctaatggacatggtagattaaagacggctacatacacattttttaattaatagattttttgagcactttgtggctcatgcctctaatcccatcacttttggaggctgaggtgcgtggatcatgaggtcaggagatcgagaccatcctggccaacgtggtaaaaccccttctctactaaaatacaaaaaattagctgatagactaacatcaagataacatctgggtttttagctgcactgagtcaagcctacttacatctttgtcttccgctgcacttttccttccacatcacactccaggaatgccaagctgtgctagccttctaccccatttccactattttgtcccggccgcagcgggtttttgtggctttttgccaccgcggctgtttgcccccaccgccgcgggtttttgccgccgcgggtttttgccgctgcagcttgttgccgccgcggcttgttgcccccgtcgccccggctttctcccctgccgccgcagcttgttgcccccgacgtcgcggctttttatggctttttgcccccgtcgccgctcctttttgcctccgccaccgcgggtttttgccaccgcggctgtttgcccccgccgccacgtctttttgtcgcccctgctttttgcccccgccgccacggctttttcccctgcggccgcagctttctgcccccaccgccgcgactttctgcccccgtcgccacagctttttgccgctgcggctttttgacccgccgccgcggctttttgcccccgccgccgaggctttttgccgccccggctttttgcccccgccgccccggctttttgcggcttttcgccccgccgccgcggctttttcccccccgccgccgcggcttttttctccccgccgccgcggcttttttctgccccgccgtcgcgttttttttgccgcttttcgcccccgccgccggggatttttgtccccgttgccgcgggtttttgctcctcccgccttaggttttggccgttgtggctttttgcccccgccgccgcggctttttgcgcccaccgccccgcctttttgctcccgccagcgcggctttttgtccccgccgctgcggctttttgccccccccgccacggcttttgccgacgcggctttttccccccgttgcggctttttgtccccgccgccgccgctttttgcggcttcttgctccccccccgccgcggcggcttcttcctcccctccccccaacgccgcggcggcttcttgctccccacgccgcgggttttggccgccggtggtttttgcacccgcctccgcgggttttgctaacgcggctttttgcttcccgccgccgcccctttttgtccccgccgccgcggctttttgcgccccgcgccgctgcttttttttcgctcctgccgccggcgcttgttgctcccgccgccgcggcttgttgccctcgcggcttttcccccccgccgccgcggctttttgctcctccagccgcaggttttggccgccgtggctttttgtccccgccaccgcggctttttgcccctctccctccacgggttttggccgccgccgccgccgcagccttttgtcgccgtgtttttttcccccgccgccgcggttttttgtccccgccgtcgcggctttttgcagctttttgtccccgccgctatgggttttgctgacgcggcttttgacccccaccgccagggctttttgcccccgccgccacggatttttgcccccgccgccgcggcttttgccaacgtggtttttgccaacgccgccgcggcttttttccccgtcgcggctttttgtccccgccgccgccgctttttgcccccaccgccgcgactttttgttccccccgccgcgggttttggccgccggtgcttttcgcacccgccgtcgccgcaggttttgccaacgcggctttttgcccccagcgccgcggctttttgcttctcgcccccgcccctttttgcaccccgccgccacggctttctgcccccgtctccacagctttttgccgctgcggctttctgacctgtcgccgagggttttggccgccgccgtcgcggccttttgtggttttttgcccccgccgccgcggcttttggcccccgccgcccggctttttgccgccgcggtttttgcccccgccgccgctgctttttgcggcttttcgcccccgccgccgcggctttttgcttccagccgccgcccctttttgtccccgccgccatggctttttgcgcccaccgccgcggctttttgctccccgccgccgcggttttctgcccccgccgccaaggctttttgctgctcgggctttttgccctcgccgccgtggctttttcccccgatgccgcggcttttggcccccgccgccactgctttttgtggttttttgcccctgctcccgctgctttttgcccccgctgctttttgcggcttttcgtccccgccgccggggctttttgctccccgccgccggggctttttgctccccgccgccgcggctttttgctccccgccgccgcggctttttgccctcgctgccgctgctttttggggcttttcgcccccgccgccgcgggtttttgccgcccgggctttttgcccctgccgtcgcgactttttgcccccgccgccgcggcttttgcccccgatgccgcggctttttgccccccgacgccgaggcattttgccgccgaggctttttgccgccgtggctttttccccccgccgctgcggctttttgtgtttttttgccccccgctcccgcggctttttgccagcgccgccgcgcctttttcccccgccgccgccgctttttgccgccgcagctttttacccccgtcgccgaggatttttacccccgccgccgccgctctgagggcgggagcggcagacttggccgccagctccactggcgtcctggcaagggcagcgccgaggggcgctcctggtccagctcccccggctcgggagtgtatgaatgctttgtgttctcacaaagagaatgtagcacccatgtcctacctgcttggttgcattgccggtgcccacggtagtccattttatccaggtttttaggttttgttgtgtttcgttttgtttttttcttttcaggagagttagtccaagactaataactccgtaactggtagaattggaagactttaatagtgcttaacgttttgtacatagctttataagttttctttttttctgattcttttcaatataccccgtcatggttgaactcagtcattgcttatttaaaatctataactgctgacgttttgtaaccttcgcattccagataattggttttttgtgtattttctgtatttttctccatcagtctacctagatatttgttagatgtaatattttaatatattactagcagttactccccatttcccccttttcccagcccctggcaaccactagtctattctctgtctctatggactagcatgtgccaaatataaaaaaaaaaaacagaatcatatgtgaccttttgtgtttggcttcatttatttagcatgttgtcctgattcatccatgtcgtatcttgtgtcagcacttcattactttatatgcctgaatcccattgcatgaatatactatgttttgtttatccattcattagttgatggatatttgagttgtgttcattttttgactatgattaataatgtactgtgatgagattcatgtactcgtttttgtgtggacgtatttttacaattttctttatatatctggtagtgggcatatggtacatctatgtttaaatttttgaaaaacttcaaaactgttttcgaaagtctctgtaccattttatattattaccagcagtgtatggaggttccattttttcctacctccttgctaacatctgttattttccttttttaaaaaaatatagccatccttgtagatgtgaagtggtatctagttttcatttgcatatccttaatgactaatgatgttgagcatcttttcatgtgctgattggccatttgtatatctttttagagaaatcttcatttagattgtttgctcatttaattgggttgtctttttgttattctaagaattctttatatattctggacattagttcctcatcagatgtatgacctaatagatattttctctcattctgtgggttcttttcactttcctgatggtatcctctgaagtacaaaagttttgaattttgttaaagtccagtttgttttttccttttgtcagtcttgcatttagtgttgtatctaagacccattgcctaattcacggtcacagatttatacctgtgttttcttctataaattttatagttttaccccttatatttgggtctttgatcctgatagtgtttttttttggtgaacagaatttgtttaggttttatatgaaaacccactggggctattaaggtagttttactatattatctttagaagttttatggttttgcttctcatcttattcttaatccactggaaactacatgttgtatagtcagtgttcatttatatttattcacattatttgtcttcttacgtactcaccatttcttcttgaaactcatgacttccatctaggggaacaccctaatactgaaaaacatctcttagaatttcctttagtgaaggtctcttagttagcaaatttagtatttgtttggtttttatgacttaaatattgtcttatatttggcctgtttattaaaagatatattaatttcatatgtgattattttttcttagtacattgtcttcttgcttccatttttaagacattagctcttggtctaaatccatattctttcatggataatgtgaattttttctctggttgttttcaatatattcttttcttcagggttccgttatttttatgatgatacatttaggtatttttttttccttttaaatctgtccaacttgagcttcctgaatatgaagggtggaatttttcatcactttgggaaaattccaagccattatcttttttacaaaacctttctaacagtttattgttctgcttatgtaatcctgttagttgtaatatcttatcactcttgtcttccatgtctcttgtttcttccttattttttacttctttgggcttccttctgagcaatttcttcagcctgtcttccagtttacattttccttttcaattatatgtaatctgctgtcaaatctgtcttcaatttcaacaattatgtttttatttctggaatttctgtttggctcctcaaatctgcctggtcattttttaaaatgttttttttttttgctttcattgagttgtattaaatttttattatatgcccaacaattctaattaagtctttattggtttgattttgctgagtctcttttcttttgtctttattttctttacttgtactatgttaataatctagtaataacaccaactaaatcacatgattgttttatgaattgagataatgaatatatggcataatatctggtacatagtaaatgtacatgcaacccgttataataattagaaataatgaaatataatgtatgattattaggaaatgtaccagagccacaaatttcattgagcgatataaaagacaactagagaaaacaaaaatatgccatagctggatggaaacagtaataataatgttgtgtgttcatcttcgactaaatcatgtctcatacaatttcaataaaattccaattaaatttatttttaaaacgtggcaaatacattgtaaatttaatgtaaaagaacaaacagggccaggctgagtggctcaacctgtaatcccagcactttgggaggctgaggcgggcatatcatgagatcaggagatcgagaccatcctggctaacacggtgaaaccccatctctactataatacaaaaaattagccgggggtgtttgcagacgcctgtagtcccagctacacaggagtcggaggcagaagaatggcgtgaacccaggaggaggagcttgtggtgagtggagatcacgccactgcactccagcttgggcgacagagagagattccatctcaaaaataaaataaaataaaatagaaaaagaatttgtgtcttgtttcctcattaatgttggttgaaagcatgtttgcacttgtctttgagttgtgttttattaacattgattggcatattaaaagtccctctgagcttaccttgtctaaaaaaatgtaagaagaaggactatgaggcagaggggctggtgtgagcacatgctgggcaggaggaaagaggtaatgatcaggaccagggaaatccccaaacccagcaagtcagggagccaaatgaaagcctttcatcctgtattggccacctaaccccatcgacactccaagtgaacattctctcttagagatactcattgtcctgttttttctgtaaccttgcaaaggaatctgatttctcccattagcctttcacaggaaaaaaatttcacattagaatgctattctttagaaggcatctcagattaggctgcaaggagattgaggaagttactgtcagtcacttataccccacagggacattaattcaccagagctttggtgggggagtagaggagctcattacaagcaggtctggatgctgcacagagtgtaaagggggcagaaggacccaggacacttaggcctggagatagcgccaatgctgggaggtacccttattatccccattttacagaggaggaaacagatggtaatctgtttccatccctgccagaggaggaaactggcaggtaatgtgatgaagaccatgctgccccgcagtacaggggccaggatctaagcccaggcagcctgccttgccatcagcgctctcacccataacctcgtgctgcctttaagcaggattgccctgtggccaggggcacagcttctgggttcacattccagcttctctacaatttccagctgtgtgaccttgggcaagttacttgtctgtgctcagcgtcctctgcacagtgggtatagcaatacctgcctcgtggagtcccttaagtgaattaatcactgtaacatgcttagaatggtgccatgcgcatcgtcaccatccagtacatatgggccatcatgcctgaatcctggatggattaaaagtccctctgagcttaccttctctaaaacaatgtaagaaaaagggcctgtgggaaggactatgaggcagaggggctggtgtgagcacatgctgggcaggaggaaagaggtaatgaccaggaccattgaagggtctaaaatgaccaggatccttgaagggtctaaaatctaggatcctgaaatacctggcagtgggatcctgaaatcctctggcagcattttaacatattttggctgtagaattgtaccctgctttccggggctagaaggtgtgggatcagaggcgtactcagttcagccccaaagtaggcaaagaaggttttgtcacaggcttgtctagggcccagcccctgtaacctccccttgtacctcccttgcgtgctccctcacccatattcacacatgcactctaggccttctgggccccaagggaaggagagagggtggggagtgggttcactggtctaccgaagcatgctgccttcagccctgctgaactgctgggtccagggaatgggcctgcagctgaaagggtcttgccctccctttaactttaaactttgattttcagtgatccaagagcttcatctcttcctgtgatcctgtctggatgtttatgctggatggtatgggccacttctggcaggggtgcacaggccagggcctggctggcagccatggcaggtgaggagaccttggcagatgagaagaccttctgcttctgcttcaacgtatgggtcttctcctggctctcagtacattcctcctgagccatgatgggccccagttcaatgaaaccttctgcggcagcatcatggtgcccaggggtataagctggggcatgtaccagtgctaccccaaggtatgtggttgtgggactgagtggagcccgaagggctggatgttgtacctctcttccatgtatctgccccatccttcaatcatcttcttgttattttcattttgaatcccgttttattctgtcttctcttctgagcacccatccattcatttatccattcatccatctattcatccatccattcatcccagcatcaatctatcaatccatgcatccatccatttatttgtccaaccacccatccatctatctgtccatcatttagcataaggattgatcagaagcctcctggttctggagccatagaccagacaccatggggagacatgatgaaaaacaacatatgatttgtgtgcttgaaacaaaagctaatgagtgcttaccacctgcctggcagtcttgcattcagggtacagttctcccctcatcctgagctttttggtaccttctatagtttcatttagtagtagagaatgctgagcctcataaagtggggtcacacagctgcgtagtggagtttggattggagctcagatgtgtgtgacttaggcatcaccctctgccttgagtcctccactctagggtcccagagctgctgagcattctggggttggtcagctctaaccttggtggcatgcattgagcaactctccatattttggagtcttaatgtattcctagccttagtgatggcaaggaccctgctttgggagacctgggttctagttccagtcctgtaccaaactttctgtgtgatctttgtctttctgagtccagtatttgcatctgcgtaataggacacaagcaccaactttcacagcctcatagggctattacagaggtcagagaagagaagagatatatgagtatttgtatactgtagagtgttttgtttaggtgaagggctgtcaggtcctgacaaccctctggaatgaacatgtcagaagttgtaaaccgtcaatgcccagagaggtggagtgactcttccaaggtcacatagctagtcagagacagacctaggggaaaaaaatgagagaaacatggaatctaacttgggctctgtctctaactgcctgggagactgctcaagccccttacctctctaggcctcagtttccttgtttttacaatatgtgagacaggatgaggggatggatggggaggatatctggaggccttgcgagaactcacctctagggcccaggcttgggaatccccagaacccccatattgtcctttacacctggatggctgtgctcaagggctcagggaggggggactcttgtggccctggactccctagcctttccccttctgtgggcccaccctgtgctgtcagtgtgttaggtgctggaatggtctcagctggtttgtagtcatttccgaggaagtttatggtaacctcacctctgtccgtgccatgtcctgagcagacgtccccgggagaagtcctggcagccagagctacccatgtcaccactagccatggtagtcctcttccccatgaggaggctgcaccctgggagatggcattggatggaatgggacatctgtcctgacctccccattaagcagaggtggctctgggactgtgggcagggatactgcagtggcagtgggaaacgaagtggaggaggaaatattgccgggtactaatagaatagaatgtactcgaatgtaatggatttcaatgtatttgattagaatggaatagaatcgaatggaacataatccaatggaatggcatggaatgcaatggaatggaatagaatgcaatgcaatggaatggaatcaaatagaatggaatcgaaagaaatggactcaaatggaatttattcgaatacaatggaatcgaatggaatgcaatagtatggaatggaatcgaatgtaatggaatcgaatggaatggaccggaatggaatggactggaatggaacggaatggaatagaatggagtcgaatgtaatggattgcaatgtaactgattcgaataaaatcgaatcgaatggaatggaatcgaatggaatggaccaaaatggaatggactggaatagaacagactcgaatgtaatggattgcagtgtaattgatttgaatggaatggaatctaatggaatgtaatataatggaatggaattgaaagaaatggaatggaataaaataaaatgcaatggaatggaatggagcggaactgagtggaacggaatccagtggaatagaatcgaatggaatggaatggaatggaatggacttgaatggaatctactggaacaaaatggaatcgaatggaatggaatcgaacggaacggaatggaatggaatagaatggactcgaagggaatggagttgaatggagtggaaaccaatggaatggaataaaatagaatgcaattgaatagaatccaatggaatagaatggaatggagtataatggaaagatatcgaatgtaatgtaatgtaatggaatcgaaaggaatggaatggaatataatggaaagatatcgaatgtaatgtaatgtaatggaatcgaaaggaatggactggaatggaaggtactcaaatgcaatggactggagtggaatggaatgaaatcgaatggaatggaattgaatagaatggaattgaatagaatcgaaaggaatagaatggaattgagtgtaatgaaaagatatcgaatggaatggaatggaatggactcaaatggaattgactggaatggaatggacacgaatggaatggaatggagtcgaatggaatggaatcgaatggaatggaattgaatagaatggaattgaatagaatcgaagggaatagaatggaatggagtgtaaaggaaagttatcgaatggaatcgaatggacttgaaaggaatggactggaatggaatggactcgaatggaatggactggagtggaatcgacgcgaatggaatgaaaacgaaaggaatggaaaggaatggaacggaatggaatggaatgcaaaggaatagaatagaatggaatcggatggaacagaatggaaaggaatggagtcgaatggaacagaaacgaatggaatggtatcaaatggaatggaatggaatggaatcgactcagatgaaatgcaatcgaatggaatagaatagaatggattggcatcgaatggaatggaacggaatggaatggaatggaatgggatggactgaaatgtaatggacttgaatggaatggactcaaatagaatggactcgaaaggattggtctcgaatggtatttattcgaatagaatgagatcgaatggaatgaaatagtatggaatggaattgaatggaatggaatcgaatggaatggaccggaatggaatggactggagtagaacagactgtaatgtaatggattgcaatgtaattgaatcgaatggaatggaatcgaatggaatgtaatcaaatgaaatggaatgtaatggaatataatggaaggcaatggaatggaatggagtggaatcgataggaatggaatcgaatagaatggaatcaaatggaatggactggaatggaatagactctaatggaatggactggaacaaaatggaatcgaacggattggaatggaacggaacggaaaggaatagaatgcaatggaatggactcgaatggaatgcagtcgaatggaatggaaccgaatggaatggaattgaatgtaatcgaaagaatagaatggaatggagtgtaatggaaagataacgaatgtaatggaatggaatgcactcgaatggaatggactggaatggaacggacacaaatggaatggactggagtggaatggacttgaatggaatggaaaagaatggaatgaaatggaaaggactggaatggaaaggaaaggaatagaatggaatgaaatcggatggaaaggaatggaatggaatggagtcgaatgcaatagagtcaaatgaaatggcattgaatggaatggaaaggaaaggaatggaatggaatggaaaggaatagaatggaatggaatggaaaggaatacaatggaatggaatcggatggaacggaacggaaaagaatggaatcgaatggaatagaatcaaatggaacggcatcgaatggaatggaatggaatggaaaggaatggaatagaatggactcgaatggaatggattcgaatggaatagcataggatggaatggcattgaatggaatggaatggacccatatgtaatagactcgaatggaatggactcaaatagaatgcactcaaaaggaatggtctcgaatggaattcattcgaatagaatggaattgaatggaatacaatagcatggaatggaatggaatggaatggaatggaatggaatagaatagaatggactggaatgaaatggactggaatagaacggagtcgaatgtactggattacaaagtaattgattcgaatcgaatggaatcgaatggaaagtaatcaaatggaatggaatggaatgcaatgtaatggaatagaatggaatgcaatgcaatggaatggagtggaattgagtggaatggaatcgaatggaatggaatcgaatggaatggatcggaatggaatggactggaatggaatggactcgaaaggaatggactggaacaaaatggaatagaacggattggaatggaaaggaatggaatggaatggagtgcaatggaatgcactcgaatggaatggagtcgaatggaatggaaccgaatggaatggaattgaatggaatcgaaaagaagagaatggaatggaatgtaatgaaaagatatcgaatgtaatggaatggaatggactcgaatggaatggactggaaaggaatggaatcgaatggaatggactggagtggaatggactcgaatggaatggaaacgaatggaatggaatggaaaataatagaatggaaggaaattggatggaatggaatggaatggagtcaaatggaagagaaacgaaaggaatagcattgagtggaatggaatggaatggaatggactcgaatggaatggaaacgaatggaatgaaatagaatggaaaggaatagatgggaatggaatgggttggaatggaattgaatggaatggagtcgaatggaataaaattgaatggaacggcatcaaatggaatggaacggaatggaatggagttgaatggactcgaatggaatggattcgaatggaatagaacataatggaatgccatcgaacggattggaatggaatggaatggacccaaatgtaatggactcgaatggattggacacaaattgaatgcacttgaaaggaatggtctcgaatggaatttattcgaacagaatggaatcgaatggaattcaatagtatggaatggaatagaaaggaatggaatcgaatggactggaccagaatggaatggactggaatacaatggagtcgaatggaatggacttcaatgtaatagaatcgaatggaatggaatcgaatggaatggaattgaatggaatgtaatcaaatggaatagaatggaatgccatggaatggaatagaatggaatgcaatggaatggaatagaaaggaatgcaatggaatggaacagagtggaatcgagtggaatggaattgaatgaaatggaatcgaatggaatggaatcgattggaatggactggaatggaattgaatcgaatggaatggataggaacgtaatggaatgaaaaggattggaatcgaacggaacggaatggactggaatggaatggaatgaaatgctatggtctcgaatggaatggaactgaaaggaatggaatcgaacagaatggaattggatggaattgaaaggaatagaatggaatggagtgtaatggaaagaaatggaatggaatggaatggactcgaatggaatggactgtagtggaatggactcgagtggaatggaaacgaatggaatggaatggaatggaatggaatagaatggaatggaatcggatggaatggaatggaatggaatgcattcgaatggaatagaatcaagtgtaatggcatcaaagggcacgaaaaggaatgtattcaaatggaatagaatcaagtgtaatggcatcgaagggaatgcaatggaatggaatcgaacggaacggactcgaatggaatggactcgaatggaatagaatggaatggaatggcatcgaatggaaaggaaaggaatggaaaggaaggaaacggaatggaatcggatggaatggaatcaaaagtaatggagtcaaatggaatagaatcaaatggaatggcatcgaatggactggaatggaatgaactaaaatggaatggactcgaatggaatagaatagaatggaatggcatcgaaaggaatggaatgaaatggattggaatgtaatggaatggattggacccaaatgaaaaggacacaaatggaatggactcaagtagaatggagtcgaaaggaatggtctcgaatggaatttattgaaatacaatggaatcgaatggaatgcaattgtatggaatggaatcgaatggaatggaatcaaatggaatgaaccagaatggaatggactggaatagaaccgactcgaatgtaatggattgcaatgtaattgatttcaaaagaatggattcaaatggaatgtaatcaaatggaatggaatgatatgcaatggaatggaatagaatggaatgcaataaaaaggaacggcgtggaatcgagtggaatgggatcgaatggaatggaatcgtatggaatggaatcgaatggaatggaccagaatggaatggactggaatagaaccgactagaatgtaatggattgcaatgaaattgatttgaatggaatggattcaaatggaatgaaatcaaatggattggaatggtatgcaatgcaatggaatagaatggaatgcaataaaggggaacggagtggaatcgagtggagtggaatcgagtgtaatggaatcgaatggaatggaattgtatggaatgttatcgaatggcatggactggaatcgaatggaatgtaactgaatggaatggaatcgaatggaatggaattttatggaatgttatcgaatggcatggactggaatcgaatggaatgtaactgaatggaatggaatcgaatggcatggactggaatggaatggactcgaatggaatggactggaacaaaatggaattgaacagattggaatcgaatggaactgaatggaatggaacggatttgaatggacacgaatggatggagtcgaatggaaaggaaccgaatggaatggaattgaatggaagcgaaaggaatagaatggaatggagtgtaatggaaagatatcaaatggaatggaatggactcgaatggaatggaattgaatagaagcgaaaggaatagaatggaatggagtgtaatggaaagatatcaaatggaatggaatggactcgaatggaatggagtcgaaaggaatgaaatcaaatggaatggaatcgaatggaatggaattgaatggaatagaaagcaatagaatcgaatgcagtgtaatggaaagatatggaatagaaaggaatggaacggaacggactcgaatggaatggactggaatggaatggactggggaggattggactcgaatggaaagaaaatgaatggaatggaatgaaatggaaaggaatggaatagaatggaatggaattggatggaatggaatggaatggaatgcagtcgaatggaatagaatcgaatggaatggcatcagatggaatggaatggaatggactcgaatggaatgtactcgaatggagcagaatcgaatggaatggcatcgaatggattggaatggaatggtatggaaccaaacgtaatggactcgaatggaatggactcaaatagaatggactcgagaggaatggtctcgaatggaatttattcgaatagaatggaatcgaatggaatgcaatagtatggaatggaatcgaaagaactgtaatcgaatggaatggaccggaatggattggagtggaatagaacaggctcaaatgtaacagaatgtaatgtaattgatttgaaaggaatggaaacgaatgtaatgtaatcaaatggaatggaaaggaatgcaatggaatggaatagaatggaatgcaatgcaaaggaacggagtggaatctagtggaatggaatcgaatggaatgaaatcgaatggaatggaattgaatggaatggactgaaatggaatggactcaaatggattggactggaacaaaatggaatcaatcggattggaatcgaacagaacgtaatggaatggaatggaatggactcgattggaacggagtataatggaatggaaccaaatggaattgaatcgaaataatggaagtgaatggaatagaaatggatagaatggaatggagtgaaatgaaaagatatcgaatggaaaggaatggaatggaatggactcgaatggaaaggactggaatggaatggacaggagttgaatggactcgaatggaatagaaaggagtgcgatggaatggaatgaaatggaatgggaaggaatagaatggaatggaatggaatggagtcgaatggaatagaatcgaatggaatggcatcgaatataatggaatggaacggaatttaattgaatggaatggactcaaatggaatagaattgaatgaaatggcatcgaatggaatgaaatggactcaaatgtaatggactcgaacggattagacacaaatagaatggactagaaaggaatggtctcgaatggaatttattcaaatagaatggaatcgaatgtaatgcaatagtatggaatggaatggaatggaattgaccggaatggaatggaatggaatagaacggacttgaacgtaatggaatgcaatgcaattgatttgaaagggatggaatccaatggaatgtaatcaaatggaatggaaaggcatacagtggaatggaatagaatggaatgcaatggaatggaatcgagcggaatagagtggaatggaatcgaatataatggaatcgaatggaatggaatcgaatggaattgactggaatggaatggactcgaaaggaatggactggaacaaaatggaatcgaatggattggactcgaacgcaatggaacggaatggaatggaagagaatggactggaatggaatggagtcaaatggaatggaacggaatggaatggaattgaatggaattgaaaggaatagaatggaatggagagtcttggaaagatatcgaatggaatggaatgtaatggaatggactcgaatggaatgtactggagtgcagtcgactcgaatggaatggattggagtggaatggaatagaatggaatggaaaagaatggaatggaatggaaaggaaaagaatggaatggaatcagatgcaacggaatggaatggaatggagtggaatcgaatggaatggaatcgaattgaatggactgcaatggaatggactcgaatgtaatggactgaacaaaatggaatcaaacagattggaatcgtacagaacggaatgcaatggaatggaagagaatggacttgaatggaatggagtcgaatggaatggaactgaatggaattgaattgaatggaattgaaaagaatagaatagaatggaatgtcatggaaagatactgaatggaatggaatggactcgaatggaatggactggagtggaatagacacgaatgaaatggaaacaaaagaaatggaatggataggagtagaatggaatggaatcggatggaacggaatggaatggaatagactcgaatggaatagaatagaatggaattgcatcaaatggaatggaagggaatgtaatggagtcaagtggaatggactctaatggaatagagtcgaatggaatggcatcgaatggaatggaaaggaatggaatggaatggacccaaatgtaaaggaatcgaatggaatggactcaaatagagtggattcaaaaggaatggtctcgaatagaatttattcgaatagaatggaatcaaaaggaatgcaatagtatggaatgggatcaagtggaatggaatcgaatggaatcgactggaatggaatggactggaatagaaaggactcgcatgtaatggattgaaatgtaattgattcaaactccttggaatcgaatggaatgtaatcaaatggaattgaatggaatgcaatggaatggaatggaatagaatggaatgcaatggaatagaacagagtggaatcgagtggaatggaatcgaatggaatggattcgaatggaatggaattgaatggaaaaaactggtatggaatggactcaaaaggaaaggactggaacaaaatggaatcgaacggtttggaattgaacggaatggaatggaatggaatggattcgaatggaatggagttgaatggaattcaatcgaatggaatggaatcgtacagaatggaattgaatggaatcaaaaggaaaagaatggaatggagtttaacagaaagatatcgaatggaatggagtgaaatggaatggagtcgaatggaatggactcgaatggaagggactggaatggaatcgactcgaatggaatacactggagtggaatggactttaacggaatggaaacgaatggaatggaatggaatggaaagtaacggaatggaaaagattataatggaatgaaataggatggaacagaatggaatggaatggagttgaatgggatagaatccaatcgaatggaatcgaatggcatggaatggaatggactcgaatggaatggactcaaatggaatagaatcgaatagaatggcatcgaatggaatggaatggaatagaatggaatggaatggacccaaatgtaatggactcgaaaggaatggactcaaatagaagggacatgaaaggaatggtctttaatagaaatttttcgaacagaatggaatcaaatggagtgcaatagtatggagtggaatcgaatggagtgcaatagtatggaaaggaatcaaatggaatggaatcgaatggaatggaccggaacagaatggacgggaatggaatggactcgaatgtaatggattgcaatgtaattgattcgaatggaaaggaatcgaatggaatgtaatcagatgaaaaggaatggaatgcaatggaatggaatagaaaggaatgcaatggagtggaacggagtggaatcgagtggaatggaatggaatggaaaggaatggaaaggaatgcaattgaattgaatggaatggaattggatggaacagaacagaattgaatggagacgaatggaagagaatccaatggaatggcatcgaatggaatggaatggaatggaatggaatggaccaaaatgtaatggactctaatggaatggacttagaatggactcaaaagtaatggtctcgaatggaatttattcaaatagaatggaatcaaatcaaatgcaatagtatgnnnnnnnnnnnnnnnnnnnngaatgtaatcaaatgtaatggaatggaatgcaatggaataacatagaaaggaaggcaatggaatggaacggattggaatcgagtggaatggaattgaacggaatagaatggactggaatggaatggaaatgaatggaatggactggaacaaaatgctatcgaagggattggaatcaaacggaatggaatggaatgcaatggaatggaatggactcgattggaatggagtcgaatggaatggaatcaaatggaacggaaactaattgaatggaattgaatgcaattgaaaggaatagaatggaatggattgtaatggaaagacatcgaatggaatggactcgaatggaatggagtggaatggaatggactagaacagaatggactgcacgggaacggactggaatggaatggaaacgaaaggaatggaatggaatggaaaggaatagaatcgtatggaatcggatggaacagaatggaatggaatggtgtcgaatggaatagaatcgaatggaaaggcattgaatggaatggaatggaatggactcaaaaggaatggtctcgcatgtaatttatttgaatagaatggaatcgaatggaatgcaatggtatggaatggattcgaatggaatggaaaggaatggaatggactggaatagaatggactcgaatgtaatggattgcaatgcaattgactcgaatggaaaggaatagaatagaatggaatggcatggaatggaatggaatgcaatggattggaatagaatggaaagcaatggaaaggaacagagtggaatcaagtggaatggaatcgaatggaatggaatcaaacggaatggaatcgaatggaatggactcgaatggaatgaactggaacaaaatggaattgaacggattggaatcgaaaaaaacggaagggaatggaatgggatggaatggaccctaatggaatggagttgaatggaatggaatagattggaatggaatcgaatggaatggaattgaatggaattgaaagtaatataatggaatagattctaatggaaaaaaatggaatggaatggactcgaatgcaatgtactggaattgaatggaatggactggagtggaattgactcgaatggaatggtaacaaatggaatggaatggatcagaatggaatggaatggaatagaatggaatggaatcagatggaacggaatggattggaattgagtcgaatggaatagaatcaaatgaaatggactcgaatggaatggaattgaatggaatagaatcgaatggaatggcatcaaaaggaatggaatggaattgaatggaatggacccaaatttaatggaatcgaatggcttggattcaaatagaatggacttgaaaggaatggtctcgaatggaatttattcaaatagaatggaattgaacggaatgcaatagtatgtaatggaatcgaatggaatggaatcgaatggaattgactggaatggaatggattggaatagaacggacttgaatgtaatggattgcaatgtaattgatacgaatggaatggcatcgaagggaatgtaatcaaatggaatggaatggagtgcaattgaattgaaatgaatggaatgcaatggaatggaatagaatggaatgcaatggagtggaatataatggaatgcaatggaatggaatcgagtggaatggaatcgaaaggaatagaaatgaatgtaatggactggactggaatggactggaatggaacggactcgaaaggaatttagtagaatgtaatggaacccaatggaatggaattgaattgatacaaaaggaatagaatggaatggagtgtaatggaaagacatcgaatggaatagaatggaatggaaaagactcgaatggaatgcactggaatggaagggactcgaatggaatggactggagtggaatggactcgaatggaatggaaacgaatagaatggaatggaaaggaatggaatggagtggaaagtaacagaattgaatggaatcggatgaaacggaatggcatagaatggagtcgaatggaatagaaccgaaaggaatggcatcgaatggaatggaatataagggaatggaatggactcaaatggaatggacactaatggaatagaatcgaaaggaatggaattgaatggaatggaatggagtggaatggaatggacccaaatgtagtggacacaaatggaacggactcaaatagaatggactcgaaaggaatggtctcgaatggaatttatacgcatagaatggaatcggatggaatgcaattgtatggaatggaatagaatggaatggaatcgaatggaatggaccagagtggaatggactggaatagaatggactcgaaagtaatgcattgcaatgtaattgatttgaatggaatgaaatcgaatgtaatgtaatgtaatggaatggaatgcattggaatggaaagcaatgcaatgaaatggaatagaatggaatgaaacgaaatggaatggagtgcaagccaatggaatcgaattgaatgaaatggaatcgaatgcaatggaatcgaatggcatggaatggaatcgaatggactcgaatgtaatggagtggaaaaaatggaatcaaacggattggaattgactctaacggagtggaatggaatggaagagaatggactcgaagggaatggagtcgaaaggaatggaacggaatagaatgaaattgaatggaattgaaaggaatagaatggaagggagtatcatggaaagataacgaatggaatggaatcgaatggactcgaatggaatggactttaatggaggggactcgaatggaaaggattggagtggaatggactcgaaaggaatggactggagtggaatggactcgaatggaatggaaacgaatggaatggaatggaatggactggaacggaaaggaatagaatggaatgcaatcggacggaacggaatggattggaatggagtcaaatggaatagaatcaaatataatggcattgagtggaatgcaatagaatggaatcaaaaggtatggtatgaaatgtactcgaatggaatggactcgaatggaatagaatcaaaaggaatggcatcgcaaggaaaggaaagaaatggaatgaaatggaaaggaatagaatggaatggaatcggatggaatggaatggaaaggaatggaatggagtcgaatggaagagaatcgaatgaaaagtcgttgaatggaatggagtggaatggaatagaatggactcgaatggaatggactctaatggaatagaatcaaatggaatggcatcgaatggaatggaatggagtggaatgtactcgattggcatggagtcgaatggattggaatcgaatggaatggactcgaatggaattgaatggaatggaatggcatcgaatgaaatggaatggaatggaatggaattgaatgtaccgaaatgtaatggaattgaaaggaatggaatcaaatagaatggacccgaaaggagtggtctcgaatggaatttatttgaatagaatggagtcaaatggaatgcaatagtatggaatggaatcgaatggaatggaatcgaatggaatgaaccgtaatggattggactggaatagaaaagacttgaatgtaatgaattgcaatgtagctgtttcgaatggaatggaagcgaatggaatgtaatcaaatgggatggaatggaatccaatggaatggagtagaatggaattcaatggaaaggaacggagtggattcgagtggaatggaatcgaaagaaatggaattgaaaggaatggaatcgaatggaatggactgcagttgaatggactcgaatgaaatggactggaacaaaatggaatcaaacggattggaattgatcggaacggaatggaatggaatggaatgcgatggaaaggagtagaatggaatggaatcagatggaaaggaatggaatggaatagagttgaatggaatagaatcgaatggaaaggaatagaatggaatggaatcagatggaaaggaatggaatggaatagagttgaatggaatagaatcgaatggaatggcatcaaatggaatgtaatggaatggaatggtatggactcgaatggaattgactcgaattgaatagaatagaatggaatagtatcgaatgtaatgtaatgtaatgaaattgaaaggaatggaaccaaatgtaattgactcgaatggaatggactcaaatagaatggactcaaaagaacagtctcgcatggaatatattcgaatagaatggaatcgaacggactgcaatagtatgcaattgaatagaatggaatggaatcaaatggaattgaccggaatggaatggactggaatagaacggacatgaatgtaatggattgcaatgtaattgatttgaatggaatggattcaaagggaatacaatcagatggaatggaatggtatgcaatgttatggaatagaatggaatgcattaaaatggaacggagtggaattgagtggaatggaatctaatggaatggaatcgaatggaatgaattgtaatggaatggacacgaatggactggactggaacaaaatggaatcgaatgcactggaatcaaacggaacagaatggaatagaatggaaaggaatggaatcgaatggaatggagtcaaatggaatgtaatcgaatggaatggaatcaaatggaatagaattgaatggaattgaaaggaatagaatggaatggagtgcaatggaatgatatagaatttaatggaatggaatggaatggaatcgaaaggaatggattcgaatggaatggaatagaatggaatggaattgaatagaatcgaaaggaatagaatggaatggagtgaaatggaatgatatcgaatggaaaggaatggaatgggatggactcgaatggaatggattggaatggaatggactcgaatggaatggaaaggaatagaatgggatggaatcggatggaacagaatggaatggaatggagtcaaatggaatagaattgaattcaagtgcatcgaatggaatggactctaatggaatggactcgaatggaacagaatcgaatggaagggcatcgaatggaatggaatggaatggaacgaaatgtaatggactcgaatgcaatggactcaaatagaatggacttgaaaggaatgctctcgaatgtaatttattcaaatagaatggaatgcaaaagaatggaatggaatcaaatggaatggaccagaatggaatggaatgaaatagaatggactcgaatgtaatggattgcaatgtaattgatttgagtggaatggaatcgaaaggaatataaaaaatggaaaggaatggaatgcaatggaatgaaatagaatggaatgcaatggaaaggaatggagtggaatcgagtggaatggaatcgaatggaaaggaattgaaaggaatggaattgaattgaatggactcgaatggaatggactcgaatggaatggagtagaacaaaatggaatcgaacagataggaatggaatggaatggaatggaaaggaatggaatggactcgaatggaatggagtcgaatggaatggaatcaaatggaatggcattgaatggaattgattggaatagaatggaagggaatgcaatggaatggaccctaatgttatggacacgaatggaatagactcaaatagaatgaactcgaaaggaaatgtctcgaatggaatttattcgaatagaatggaatctaatggaatgcaatagaatggaatggaatcaaatggaatggactggaatggaatggactgaaatagaatgtactcaaatgtaatggaatgcaaggcaattgatttgaatggaatggaatcgaatgcaatgtaatcaaatggaattgaatggtatgcaatggaatggaaaagaatggaatgcaatggaatggaacggaatggaatcgagtggaatgaaatcgaattgaatggaatcgaatggaatggaattgaatggaatggacttgtttgggatggactcgaatggaatggactggaacaaaatggaatcgaacggattggagtcgaatggaagggaatggaatggaatggaatggaaaggaatggactcaaatgaaatggcatcaactggaatggaaccaaatggaatggattagaattgaatggaatcgaaaggaatacaatggaatggagtgtaatggaaagatatcaaatggaatggaatggaatggaatggaatggactggaacagaatggcctcgaatggaatggactggagtggaatggaatggaaaggaatagaatgggatggaataggatggaacagaacggaatggaatggagtcgaaaggaatagaattgaattgaaatgcatggaatggaatggaatggactcgaatggaatggactcgaactgaatcgaattgaatggcatcgaatggaatggaatggaaccaaatgtaatggaatgtaatgtaatggactcaaatataatggactcgaaaggaatgctctcgaatgtaatttattcaaatagaatggaatccaaagaaatccaatagaatggaatggaataaaatggaatggaatcgaatggaatggactgcaatataatggaccggaatagatcggactcgattttaatggattgcaatgtaattgattcgaatggaatggaatcaaaagaaatataaccaaatggaatggaatggaaagcaatggaatggaatagaaaggaatgcaatggaaaggaatggattggaaccgagtggaacggaatcaattggaaaggaatagaaaggaatggaatcgaatggaaaggactctaattgaatggagtggagcaaaatggaatcgaacggataggaatcaaatggaacagaatggaatggaatggaatggactcgaatggaatggagttgaatggaatggaatcgaatggaatggaattgaatggaatcgaaaggaatagaatggaatgcagtgtaatggaaagatttcgaatgtaatggaatggaatggaatggactcaaaaagaacggaatggaatggaatggacacgaatggaatggattggggtggaatgaactcgaatggaatggaaacgaatgtaatggaatggaatggaaaagaatagaatggaatagaatcggaaggaatggaatggaatggaatggagtcgaatggaatagaatcaaacgtaatggcagcgaatggtatggaatggaatgaatcgaatcgaatggaatggactcgaatgaaatagaatccaatggaatggcatcgaatggaattgattggaatggaatggaatggacccaaatgttatggacttgaatggaatagactcaaatagaatgtactcgaaaggaatggtctcgaatggaatttattcgaatagaatggaatctaatttaatgcaaaagaatggaatggaatcaaatggaatggaccggaatagaatggactgaaatagaatgtactcgaatgtaatggattgcaatgcaattgatttctatggaatgaaattgaatgaaatgtaatcaaattgaattgaatggtacgccatggaatagataagaatggaatgcagtggaagggaacagagtggaatcgagtggaatgaaatcaaatcgaatggaatcaaatggaatagaatcgaatgcaatggacttgtttggaatggactcgaatggaatggactggaacaaaatggaattgaacggtttggagtcaaatgtaatgtaatgtaatggaatggaatggaaaggaatggactcgaatggaatggagtcaaatggaatggaactgaatggaatggattaggattgaagggaatcgaaaggaatagaatggaatggagtgtaatggaaagatattaaatggaatggaatggactagaatggaattgactggaatggaatggcctcgaatgcaatggactggagtggaatggactcgaatggaattgaaatgaatggaatggaatggaatggaaaggaatagaaaggaatggaactgaatcagatggaatgtaatggaatggaatggagtcgaatggaatagaatcgaatggaatcgcatcaaatggaattgaatggaatggaatgttatggacttaaatggaatagaatcaaatggaaaggcatcgaatggaatggaaaggaatggaaatgaacggaatggattggttccaaacgtaatggacttgaatggaatggactcatatagaatggaatcgaaaggaatggtctgaatggaatttattcgaatgcaatggaatcgaaaggaatgcaatagtttctaaaggaattgaatggaatggaatcgagtggagtgtactggaaaggtatggactggaatagaatggagtcgaatataatggaatgaaatgtaattgattctagtgccttggaatcgaaaggaatgtaatcaaatggaatggaatggaatgcaatggaatggaatggaatggaatgcaatggcatggaatagaatggaatgcaaaggaatggaacggagtggaatcgagtggaatggaatcaaatggaatggaatcgaatggaatggaattgaatggagtagaatggaatggactggaacacaatggaatcgaacggattggaatggaatggaatggacccaaatgtaatggactcgaatggaatggactcaaacagaatggactggaaaggaatggtctcaaatggaatttatttgaatagaatttaaatggaatggaatgcaatggtatgcaatggaatcaaattgaatggaattgaatggaatggaccggaatggaatggactgctatagaacttactcgaatgtaatagactgcaatgtaattgtttcaaatgaaatggaatcgaatggaatgtaatcaaatggaaaggaatggaatgcaatggaatggaatagaatggaatgcaatggaatggaacggagtgcaatcgagtggaatggaatcgaatggaatgaaataaaatggaatggaattgaatggaatggaattgaatggaattgaaaggaatagaagggaatggagtgtaatggaaagatattgaatggaatggaatggactccaatggaatggagtgtaatggaatggattcgaatggaatggactggagaggaatggattcaaatgaaaaggaaacgaatggaatgcaatggaatggaacggagaggaatagaatggaatggaattggatggaacggaatggaatggaatggattcaaatgaaatggacttgaacagaatggcattgaatggaatggaatggaatggactcgattggaatggactcgagtggaatagaatcaaatggaatggcatcgaatgtaatgtaatgtaatggaatggaatggaatggattggaatcggaaagattggaatagaacggaatggagtcaaatggaatagaatcgagtgggatggcaatgaatggaatggaaaggaatggaatggatttgaatggagtggagtcaaatggaatagaatggaatggaaaggcattgaatgtaatggaatggagtggaatggaatggacccaaatgtaatgaacttgaatggaatggacaaacagaatggactcgaaaggaatggtctggaatggaatttattcgaatagaatggaattgaatggaaagcaatagtatggaatggaatcgaatggaatggaatcgaatggaatggaccagaacggaatggactggaatagaacggactcgaatgtaatggactgcaatgtaattgattcgaaaggaatggaatcaaatggaaaataatcaaatggaatggaatgcaatgcaatggaatggaatagaatggaatgcaatggaatggaacggagtttaattgagtggaatggaatcgactggaatggaattgaatggaatggtctcgaatggaatggactggaacaaaatggaatcaaagagactggaatcgaatggcatggaatggaatggaaaggaatggactcgaatggaatggagtagaatggaatggaagcaaatgaatggaattgaatggaatcgaaaagaatagaatgaaaagcagtgtaatgtaaagatatccaatggaatggaacggaacagagaggactcgaatggactggaatcgaatggaatggactggaattgaatggactcgagtggaatggacgagaacaaaatggattcgaacggattggaactgaacggaatggaaaggaacggaatggattggaatggacccgaatggaagggagtcgaatggaatgtaatcaaatggaatggatacgaatggaatggaaatgaatggaatcgaaaggaatagaatgaaatggagtgaaatggaatgatatcgaatggagtggaatggaatcgaaaggaatggatgggaatggaaaggaatcgaagggaatgatctggagtggaatggacttgaaaggaatggaaacgaatgaaatgggatggaatgaaaaacgatagaatggaatggaatcagatggaatggaatggaatggaatggattcgaatgaaatagaatggaatggaatgtcattgaatggaatggactcgaatggaatggactcaaatggaaatagaacagaatggaatggcatcgaatggaatggaatggaaaggaatggacccaaatgtaatggacgcgaaaggaatggtcttgaatggaatttattcgaatagaatggaatcgaatggaatgcaatagaatggaatgtaatcgaatagaatggaatctaatttaattgactggaatggaatggactggaatagaaaggactcgaatgtaaaggattgcaatataattgatttgaatggaatggattcaaatggaatgtaatcaaatggattggaatggtatgcaatggaatggaatagaatggaatgcaataaaaaggaacggagtggaatcgagtggaatggaatcgaatggaatgggatcaaatgtaacagattcgaatggaatggactggaatggaatggactcgaatggaatggactggaacaaaatgcaaccgaacagattggaatcgaactgaacggaacagaatggaatggaatggaatggaatggagtcgaaaggaatggaagcgaatggaatggaactgaatggattcgaaaggaatagaatgaaagggagtgtaatgtaaagatatccaatggaatggaatggaatagaatggagtagaatggactgcaatggaatagaatggagtagaatggactggaatggaatggacccgaatggaatggactgcagtggaatggaatcaaatggaatggaaacgaatggagaggaaaggaatggaatggaatagaatagaatggaatggaatcagatggaatggaatggaacagaatggagtcgaatggaatagaatcgaatggaatggcattgaattgaatggaatagaaaggaatgggctcgaatggaatggactcgaatgcaacagaatagaatggaatggcatcgaatggaatggaaaggaatggaatggaatggacccaaacgtaatggactctaatggaatggactcaaatagaatggacttgaaaggaatggtctcaaatggaatttattagaatagaatggaatcgaatggaaagcaatagtatggtatggaatcgaacggaatggaatcgaatggaatggactggaatggaatggataggaatagaaaggactcgaatgcaatggattgcaatgtaattgattcgaatggaatggaatcgaatggaatgtaatcaaacggaatagaatggaatgcaatggaaaggaagaggatggaatgcaatggaatggaacagagtggaatcgagtttaatggaatcgaatggaatggaatcaaatagaatgtactcgagtggagtggaatcgaatggaattgactctaaaggaatggtctcgaatataatttattcgaacagaatctaatcgaatggaatggaaacggaatggaatggaatggtatgaaatggtatagaatggaatggaattggatggaacggaatggaatggaaagtagttgaatggaatagaatccaatggaatgacatcgaatggaatggaaagaaaagaatggagtgggatggactcgaatggaatggactcgaatggaatggactcgaatggaatagaatggaatggaatggcatgcaatggaatggaattgacccaaacgtaacggactcgaatggaatggactcaaatagaatggactcgaaaggaatggtctcgaatggaatttattcgagttgaatggaatcaaatggaatgaaatagtatggaaaggaatcgaatggaatggaatcgaattgaatggactggaatggaatggactggaatagaaccgactcgaatgtaatggattgcaaggtaacagattcgaatggaatcgaacggaatgtaatcaaatggaatggagtggaatgcaatggaatggaatagaatggaatgcaatggaatggaatgcagtggaatcgcgcagaatggaatcaaatagaatggaatcgaatggaatggattcgaatggaatggagtcaaatgcaatggattggaacaaaatgaaattgaaaggattggaatcaaacggaacgggatggaatggaatggaatggagtggacttgaatggaatggagtcgagtggaatggaatcgaatggaatggaattgaatggaattgaaaggaatagaatggaatggagtttaagggaaagatatcaaatggaatggaatttaatgcaatggattcgagtggaatggactggaatggaatggactcgaatggaatggcctggagtggaatggactcgaatggaatggaaacgaatggaatggaatgcaatggaatggaacggaaaggaatagaatagaatggaatcggatggaatggaatggaatgcaatggagtcgaatggaatagaatctatggaatggcaacaaaaggaatggacaggaatggactcgaatggaatataatcgatggaatggcatcgaatgtaatgtaatggaatgtcatggaatggaatggacacaagtgtaatggattcgaatggaatgggctcaaacaaaatggactcgacaggaatgttttcgaaaggaatttattcgaatagaatggaatccaatggaatgcagtagaatggaatggaatcaaatggaatggaatagagtggaatggaccaaaaggaatggaccggaatagaacagacacgaatgtaatggattgcaatgtgattgatttgaatggaatgacatctaatggaatgtaatcaaatggaattgaatggaatgcaatggaatggaatagaacggaatgcaatggaatggaacgcactggaatagagtggaatggattcgaatggaatggactggaatggaatggagtcgaatggaatggactggaacataatggaattgaacaaattagaattgaaaggaatggaatggaatggaatggaatggaatagattcgaatggaatggagtcaaaaggaatggaatcaaatggaatggaattgaatggaactgaatcgaatgaaatggagttgaatggaatcaaaaggaatagaatgcaatggagggtaatggaaagatatcgaatggaatggaatggaatggactcgaatgggatggactggaatacaatgaactaggatggaatagactggagtggaatggactcgaatggaatgtaaatgaatggaatggaaaggaatagaatggaatggaatcagatggaacagaatggaatggaatggagttgaatggaatataatggaatggaatggaatggaatggaatagaatggaatgaaatggaacggactggaatggaatggactcaattggaacagaatcgaatggaatggcatcgattggaatggaatggaatggacacaaatataatggactcgaatggaatggactcaaatataatggactcaaaaggaatggtctcgaatggaatttattcgaatagaatgaaatcgaatggaatgaaatagtatggaatggaatcgaatggaatggaatcgaatggagtggaccagaatggaatggactggaatagaacagacttgaatttaatggattaaaatgtaattgattcaaatggaatggaatcaaatggaatgtaatcaaatggaatggaacggaatgcatcgaaatggaatagaatggaatgcattggaatggaaggagtgtaatcgagtggaatggaatcgaatggaatggattcgagtggaatggaatggaatggaatgcaatggactccaatggaatagactggaacaaaatggaatcgaatggattggaatcgaacggaatggaatggaatggaatggactcgaatggaatggagttgaaaggaatggaggctaatggaatggaatagaatagaatggaatcgaatggaatggaattgaatggaatcgaaaggaatagaatggaatggagtgtaatggaaagatattgaattgaatggaatggactcgaatggattggactcgaatggaatggactggagtggaatggactcgaatggaatggactggagtggaatggattcgaatgcagtggaaacgaatggaatggaatgcaatggaatagaatggaaaggaataggattcaatggaatcggatgtaatggaatggaatggaatggagtcgaatggaatagaattgaaaggaatggcatcaaatggaatttacaggaatggaatggaatggaatggactcgattgaaatataatcgaaaggaatggcatcgaatgtaatgtaatggaatggaatggacccaaatgtaatggattcgaatggaatggtctcaaacagaatggaatagaaagaaatggtctcaaatggaatctattcgaatagaatggaatcgaaaggaatgcaatagtatggaatggaatcaaatggaatggaatcgaatggaatggtcagaatggaacaaactggaatagaacgaactcgaatgtaatgaattgcaatgtaattgattcgaatggaatggaatcgaatggaatgtaatcaaatggaatggaatgcaatggaacggaacggagtggaatcaagtggaatggaatcgaatggaatggtatccaatggaaaggactggaatgcagaggactcgaatggactggaacaaaatggaattgaatggattacaatcaaaaggaagggaatggaatggaatgtaatagagtggaatagactcgaatggaatggatgcgaatggaatggaatcgattggaatggaatcaaatggaatggaattgaatggaaatgaaacgaatagaatggaatggagtgtaatggaaatatatcgaatggaatggaatggactcgaatggaatggactggaatgaagtggtctagaatggattggactggagtggaatggactcgaatggaatggaaatgaatggaagggaatggaatgcaacggaatggaatggaaaggaatagaatggaatggaatcagatgtaatggaatggaagggaatggagtcgaatggaatagaatcgaatggaatggcattgattggaatgcaatggattggacacgaatggaatggactgaaatggaatgaactcaaatggaatggactgcagtgaagaggactcgaatgaaatggaaaagaatggaatggaatggaatggaatggaaaggaatagaatggaatggaatcggatggaacggaatcgagttgaaaggaatagaatccaatggaatggcaccgaatggaatggaatggcatggaatggaatggactcgaatagaatggactcgaatgtaatagaattgaatgtaatggcatcaaatggaatggaatggaatggaatagaatggaatggaatggacccaaatgaaatggactcgcatggaatggactcaaatagaatggacttgaaaggaatggtctcgaatggaatttattcaaatagaatggaagcgattggaatgcaatagtatggaatggaatcaaatggaatgcaatcgaatggaatggaccagaatggaatggactggaatagaacagactagaatttaatggattaaaatgtaattgattcaaatggaatggaatcaaatggaatgtaatcaaatggaatggaatggaatgcaatggaatggaatggaatagaatggaaggctatggaatggaacggagtggaatcgagtggaatggaatagaacggaggggaatggtttggaatggaattgaatggaatggacttgaatggaatggactggaatgcaatggacttgaattgaatagactggaacaaaatggaatcgaacggattggaatcgaacagaacaaaatggaatggaatggagtggaatggaatggaataaaatggagtcgaatggaagggaatcgaatggaatggactggaatggaatggactggaatggaatggactcgaatggaatggactgcagtggaatggcctcaaaaggaaaggaaaccaatggaatggaatggactgcagtggaatggactcgaaaggaatggaaaccaatggaatgcaatggaatggaatatgatggaatggaatcggactcaaaggaatggaatggaatggagttgaaaggagtagtatctgatggaatgtcatcgaatggaatggaatggaataaaatggactcgcatataatggactcgagtggaatagaatcgagtgtaatggcatcgaatggaatggaatggagtggaatggaatagaatggaatggaatggacccaaatgtaatggacacaaaaggaatggactcaaatagaatggacttgaaaggaatggtctcgaatggaatttattcgaatagaatggaatcgaatggaatacaatagtatggaatgtaatcgaatggaatggcatcgaatggaatggaaaggaatggaatgcaatggaatcgaatggaatacaatagtatggaatgtaatcgaatggaatggcatcgaatggaatggaaaggaatggaatgcaatggaatcgaatggaatggacccaaatgtaatggacttgaatggaatggactcaaatagaatggacggaaaaggaatggtctcgaatataatttattcaaatagaatggaatagaaagtaattcaatattatggaatggaatagaatggaatgaaaccgaatggaatgtaccggaatggattggattggaatagaatgtactggaatgtaacggatagaaaagtaattgattcgaatgccttggaatcgaacggaatgaaatcaaaagaaatggaaaggaatacaatggaacggaatagaatagaatgcaatagaatggaacgtagtggaatcgagtggaatggaatcgaatggaatggaatcaaatggaatggagtcaaacgcaatggactggaatggaatggactcgaatggaatggactggaacaaaatggaattgaaccgattggaatcgaatggaacggaatggaagggaacgtagcgtaatgtaatggaatggaatggactacaaaggaatggagtcgaatgtaatggagtcgaacggaatgaaatcaattggaatggaatcgaatggaatggaattgaatagaatcaaaagaaaaagaatggaatggagtgtaatggaaagatatcgaatagaatggaatagacttgaaaggaatggactggaatgcattggacacgaatggaatggactggagtggaatggactcgaatggaatggaaacaaatggaatggaatggaaaggaatagaatggaatggtatcgcatggaacggaatggaatggaatggagttgaatggaattgaaaccaatggaatggcgtcgaatggaatggaatggaaaggaatgaaaggactcaaatggaatggactcaaaaggaatagaatcgaatggaatggcattgaaaggaatggaatgaaatggaatagaatggaatggaatggacccaaatgtaatggactggaatggattggactcaaatacaatggactggaaaggaatggtctcgaatggaatttattcaaatagaatggaatcgaatggaatgcaatagtatggaatgcaatcaaactgaatggaatcgaatggaatgaactggaatggaatggacaggtatacagtggactcgaatgtaatggattgcaatgtaattgattcaaatggaatggaatcgaatggaatgtaatcaaatggattggaatggaatgcaatggaatggaatagaatggaatgcaatggaatggaatagaatggaatgcaattgaatggagcggagtggaatcgagtggaatgaaatcgaatggaatggaatggaaagcaatcatatggaatagactgtaatggaatggactcgaatggaatggaatggaaaatatggaatcgaacggattggaatcgaacagaatggaacgaaatggaatagactagaatagaagagacacgaatgtaatggactgcaatctaattcattcgaatggaatgggatcgaatggaatgtattaaaatggattggaatcaaatgcaatggaatggaatagaatggaatgcaatggaatggaacggattggaatcgaatggaattgaatcgaatggaatggaatccaacggaatggaatcgattggactggaaatggactggagtggaatggacgcaaaaggaatggaaacgaatggaatggaatggaaaggaacagaatggcatggaatcagatggaacggaatggaatggaatggagtcgaatggaataaaatccattggaatgacatcgaatggaatggagtggaatggaatggaatggaaagtactcaaatggaatggaaagtactcgaatggaatggactcgaatggaatagaattgaatggaatggcatcaaactgaatggaatggaatggaatggacccaaatgtaatggacacaaatggaatggactcaaatagaatggactagaatggaatggtctcaaatggaatttattcgaatagaatggaatcgaatggaatgcaatagtatggaatggaattgaatgcaaaggaatcaaatggaatgaattggaatggaatggactggaatacaacggactcaaatgtaatggactgcaaagtaattgatacgaatagaatggtatagaatggaatgtaatcaaatggaatgcaatggaatgcaacggaatggaatagaatggaatgcaatggaatggaacggagtcaaatcgagtggaatggaatcgtatggaatggaatcgtttggaatgcactggaacggaatgtattagaatggaatggactggaaaaaaatggaatcaaagggattggaatcgaatggcatggaatagaatggaatggaatgcaatggactcgaatggaatggagttgaatggaatggactcaaatggaatggactggaatggaatggaatcgagtggaatggatggagtggaatcgaattgaatggaatggaaacaaatggattggaaaggaatggaatggaaaggaataaaatagaatggaatcagatggaatggattggaatagaatggagtcaaatggaatagaatcgaatgcaatggcatggaatggaatggactcgaaaagaatgggcacgaatggtacagaatctaatggaatggcaaggaatggaatggaatggaatggaatggacccaaatgtaatggagtcaaacggaatggactcaaatagaatggactcgaaagcaatggtctcgaatgttatttattcgaatggaaaggaatcgaatggaatgcaatagtatggaatggaatctaatggaatggaattgaatggaatggaccggaatggaaaggagtggaataaaacggactcgaatataatggattacaatgtaattgatttgaatggaatagaatcgaatgaaatgaaatggaaaagaatggaatggaatggaaaggaatagaatggaatggaatcggatggaacgaaatggaatggaatggtgtcgaatggaatagaattgaaaggaatggcatcaaatggaatgaaatggaatggaatggactcaaatgaaatggactcgaatgtaatagaatagaatggaatggcattgaatggaatggaatggaaccaaatgtaatggacgtgaatggaatggaatctaatagaatggactcgaaataaatggtctccaatggaatatattcgtgtagaatggaatagaatggaatgcaatagtatggaatggaattgaatggaatggaaccgaatggaacggaccggaatggaatggactggaatagaatggactcgaatgtaatggattgcaaattaatagatttgaatggaatggaatcgaaaggaatgtaatcaaatggaatggaatggaatgcaatggaatggaatagaatggaatgcaacgaaatggaatagaatggaattcaatggaaaaaacgcattggaatggggagaaatggaatcgaaatgaatggaatagaaaggaatggaatcgaatggaatggactggaatgtaatggacaccaatggaatggactggaacaaaattgaataaaacgaattggaatagaaccataaggaatggaatggaatggaatggtatggagtagaatggagcggagtcgaatggaatggaaatgaaagcagtggaattgaatggaatcaaaaggattagaacagaatggagtgaaaaggaaagatatcgaatgtaatggaatggaatagaatggactcgaatggactggactggaatggaaaggactcaaatggaatggactggagtggaatggactcgaatggaatggaaatgaaaggaatggaatggaatgaaatcagatggaaaagaatggaatggaatggagtcgaatggaatagaatcgaatgcaatggcatcaaatggaatggaatcgaatggaagggacttgaatggaatagaatcgaatggaatggcatcgaatggaatggaatggaatggaatggacccaaaagaagtgtactcgaatagaatggactcaaatagaatggactcaagaggaatggtttcgaatggaatttattcgaacagaatggaatcgaatggaattcaatagtatggaatggaatcgaatggaatggaatcgaatggaatggacaggaattgaatggactggaatagagcagacacaaatgtaatggattgcaatgtaattgattcgagtggaatggaatcgaatggaatgtaatcaaatggaatggaatggaatgcaatggaatggaatagaatggaatggaatatagtggaatgcaatggaatggaacgaagtggaatcgaatggaatggaatcgaaggaaatggaatccaatggaatggaatcgaatggaatggactgaaatggaatggactgaaatgtaatggactggaacagattggaatcgaaaggattgtaatcaaacggaacagaatggaatggaatggaagagaatggactcgaagggaacggagtcaaatggaatggaattgaatggaatggaattgaatggaattgaaaggaatagagtggaatgcagtgtcatggaaagatatcgaatggaatggactcgaatcgaagggactggaatggagtggactcgaatagaatgcattggagtggaatggactcaaatggaatggaaacgaatgtaatgtaatgtaatgtaatgtaatgtaatgtaatgtaatgtaatggaatagaatggaatgaaatcggatggaaaggaatggaaaagaatggaatcgaagggaatagagtggaatggaatggaatggaatggaatcagatggaatggagtggaaaagaatggacttgaaaggaatagaacagaatggaatggcatcgaatggaatggaatggaatggactcgattggaatggagtcgagtggaatggaatagaatggattggaatcgaatagaaaggaattgaatggaattgaaaggaatagaatggaatggagtgtaatggaaagatatcgtatggaatggaatgcaatggactccaagggaatggactggaatggatcggacttgtaaggaaaggactggaatggaatggactcacatggaatggaaacgaatgcaatggaatgaaatggaatggaatggaatggaatagaatggaatcgagtcggatggaatggaatggattggaatggagtagaatggaataaattcgaatgcaaacgcattgaatggaatggaatggactaaattggaatggactcgaatggaatacagtggaatggaatggcatggcatcaaatggaatggattggaaaggaaccaaatgtaatggacttgaaaggaatggactcaactagaacggactcgaaagcaatggtctcagatcgaatttattcgaatagaatggaatcgaatgaatgcaatagtggggaatggaattgaaaggtatggaatcgaatggaatggatcggaatggaatggactggaatgcaaaggactggaatgtcatggattgcaacgtaattgatttgaatgtaattgaattgaaaggaaagtaatcaaatggaatggaatggaatgcaatggaatggaaaagaatgaaatgcagtgaaatggaatggagtggaattgagtggaatggaatcgaatggaatggactagaatggaatggactcgaatggaatggactggaaaaaatggcatcgtacggaatggaacagaatggaatggagtggaatggagtggaatggaatggaatggactcgaatggaatggagtcgaacggaatggaatcgaatggaatggaatcgaacggaaaggaattgaatggaattgaaaggaatagaatggaatggagtgtaatggaaagatatcgaatggaatggaaaggaatggaatggactcgaatggaatggactggaacggaatggactcgaatggaatggactggagtggaatggactcgaatcgaatggaaacaaatggaatggaaagaataggaatggaatggaacggaaatgaatagaatggaatgcaagtgtatggaacggaatggaatggagtcgaatggaatagaatcaaatggaatggcatggaatggaatggaatgaaatggaatagaatggaatggaatgaaatggactcgaatggaattgaattgaatggaatggcattgaatggaatggaaaggaatggaacggaatggaaaggaatagaatggaatggaatatgatggaacggagtggaatggaatggagtcgaatggaaaagaatccattggaatgacatcaaatggaatggaatggactcgaatggaatggacttgaatggaatagaattgaatggaatcgcatcgaatggaatggaatggaatggtttgaaatggattggactccaatgcaatgcactcgaatggaatagattcgaatagaaaggcatcgaatggaatggatatgaatgttatggaatggacccaaacgtaatggactcgaaggaaatgcactcaaacagaatggaatcaaaaggaatggtctcgaatggaatttatttgaatagaatggaatcgaatcgaatgcaatactatggaatggaattgaatggaatggaatcgaatggaatggaccagaatggaatggactggaatagaacggacaggaatgcaatggattgcaatgtaatagattcaaatgcaatggaatcgaatggaatgtaattgaatagaatggaatggaatgcaatgaaatggaatagaatggaatgccatggaatggaacagagtggaatcgagtgcagtggaatcgaatggaatggaatcgattggaatggaatggaatggaatggactggaatggaatgaactggaacaaaatggaatcaaacggattggaatcgaacgaaacggaatggaatggcctcgaatagaatggagtcgaatggaatggaatcaaatggaatggaatcgaatggaatggaattgaaaggaattgaaaggaatagaataaaatggagtgtaatggaaagatatcaaatgcaatggaatggaatggaatccaatggaatggactggaatggaatgtattcgattggaatggactggagtgcaatgtactcgaatggaatgttaacgaatggaatggaatggaatggaaatgaacagaatggaatggaatcggatggaacggaatggaatggagtggagtcgaatggaatagaatcgaatggaatggcatcaaatagaattaaatggaatggactagaaaggaatggactcgaagggaatagaatagaatggaattgcatcaaatggaatggaatggaatggattggaatggaatggaatggacccaaatgtaatggactcatatggaatggactcaaatagaattgccttggaaggaatggtctcgaatggaatttattccaatggaatggaatcgaatgtaatgcaataatagggaatggaatcgaatggaatggaattgaatggaaaggaccggaatggaacggactgaaatagaatggactcgaatgtaatggatttcattgtaatagattcgaatggaatggatcctatggaatgtaatcaaatggaattgaatggaatgcaatggaatggaacagaatggaatgcaatggaatggaacagaatggaatgcaatggaatggaacagagtggaattgagaggaatggaatcgaatggaatggactggaatggaatggactggaatgaaatggatgggaacaaaatggaatcgaacggaatgtaatgtaatgtaatggaatggaatgcaatgcaatggaatggactcgaatggaatggagtcgaatggaatggaaatgattggaatggaattcaatggaatcaaaatgaatacaatggaatggagagtaatggaaagatatccaatggaatggaatggactcaaagggaatggactggaatgaaacggactcgaatggaatggactggagtggaatggattggaatggaatggaaactaatggaatggaatggaatggaatggaaagaatagaattgaatggaatcggatggaacggaatggtatggaatggagttgactggaatagattcgaatggaatgttattgaatggaatggaatgcactcaaatggaatggaaacaaatggaatgcaatagaatgaaatggaaaggaatagaatggaatggaatcggatggaatggaatggagttgaatggaatagaatcaaatggaacggcatcatttcgaatggaatggaatggaatggactcgaatggaatagaattgaatggaattgcttcgaatggaatggaatggaatggacccaaatgtaatggactcaaatggaatgaactcaaatagaatgcactagaaaggaagggtctcgaatggaatttattcaaatagaatgcaatcgaatggaatgcaaaagtatggcatggaattgaatggaacggaatcatatggaatggaccggaatggaatggactgaaatagaacggactcggatgtaatggattgcaatgtaatttattcgaatggaatggaatagaatggaatataatcaaatggaatggagtggaatgcaatggaatggaatagaatggaatataatcaaatggaatggagtggaatgcaatggaatggaatagaatggaatgcaatggaatggaacggagtttaattgagtggaatagaatcaaatgaaatggaatcgaatggaatggaattgaaaggaatgtaaaggaatggaatggactccaatggaatggaatggaacaaaatggaatcgaacggattgatatagaaaggaacggaatggaatggaagagaatggactcgaatggaatggagtcgaatggaatggaactgaatctaatgcaattgaatggagtcaaaaggaatagaatggaatgcagtgtaatgaaaacatatcaaatggaatggaatggaatggactcgaatggaatggactggaatggaggggaatcgaatggaatggactggagtggaatggactcgaatggaatggaaacaaatagaatgtaatggaaaggaatagaatggaatggaatcggatggaacggaatggaattgaatggagtccaatggaataaaatcgaatggaatggcatcgaatttaatggaatggaatggaatggactcgaatggaattgactcgaatggaatagaatagaatggaatggcatcaaatggaatggaatggaaaggaatggaatggaatggaccaaaatgtaatggactcgaatggaatggactcaaatagaatggactcgaaaggaatggtctggaatggaatttattcgaacagaatggaattcaatggaaagcaatagtatggaatggaattgaatggcatggaatcgaatggaatggactggaatggattggactgggatagaacggactcgaatgtaatggattgcaatgtaatagaatcaaatggaatgggatcgaacagaatgtaatcaaatgtaacagaatcgaatgccatggaatggaatagaatggaacacaatggaatggaatagaatggaatgcaatggaatggaatggagtggaatcgagtggaatggaatcaaatggaacggaatggaatggaatggaatggactcgaatggaatggactggaacaaactggaattgaacggattggaatctaacggagcggaatggaatggaatggactcgattggaatggaaccgaatggaatggaatcgaatagaatggaattgaatggaattgaaaaaaatagaatggaatggagtgtactggaaagaaatccaatggaatggaatggtctcgaatggaatggactagaatggaattgacaccgatggaatggactggagtggaatggacaggaatggaatagaaacgaatggaatggtatggaatagattggagtggaagagagtggaatggaatctgacggaattgaatggaatggaatggagtcgaatggaatggaatcgagtggaatggcatcgaatggaatagactcgaatggaaaggactcccatggaatggactcgaatggaatagaatggaattgaatggcttcgaatgaaatggaacggagtggaatggaatggaatggactcgaatggaatggactcgaatggaatagaatggaatggaatggcatcgaatggaatggaatggaaaggacccaaatgtaatggaatcgaatggaatggactcaaatagaatggactcgatagaatggtctcgaatggaatttatttgaattgaatgcaatcgaatggaatgcaacagtatggaatggaattgaatggaatggagtcaaatggaatggactcgaatgcaattgagtggaatggcctggactccaatggattggactggagtggattggactcgaatggaatggaaacgaattgaatggacgggaatgcaatggaatggaattgaaagtaatagaatggaatggaatcagatagaatggaatggaagggaatggagtcgaatgcaatataatcaaattgaatggcatcgaatggtatggaatggaacggactcgaatggattggactcaaatggaatggcatcgaatggaatggaacggaatggaagggaatggaatggaatggacccaaatgtaaagaacttgaatcgaatggactcaaatagcatggactcaaaagcaatggtcttgagtggaatttattcaaatagaatggattcgaatggaatgcaatagtatggaatggaatcgaatggaatggagcagaatggaatagactggaatagaaaggactcgaatgtaatgtattgcaacgttattgatttgaatggaatgtaatcaaaagtaatgtaaacaaatggaacggagtagaaggcaattgaatggagtagaaaggaatgcaatggaatggagtgtagtggaatcgagtggaagggaatcaaatggaatggaattgaatggaatgaactggaatggaatggacaggaatggaatggactggaaaaaaatggaatcgaacggattggaatcgaaaagaatgcaatggaatggagtggactggaatcgaatgcaatggagtagaatggaatggaaccgaatggaatggaatcgaatggaatggaattgaatggaatggaaaggaacagaatggaaaggagtgtaatggaaagatatcgaatggaatggaatggaatggactcgaatggaatgaactggaaaggaatggacttgaaaggaatggactgtagtggaatggactcgaaaggaatggaatggaaaggaaaggaatggaatggaatggaaaggaaaggaatagaatggaatggaattggatggaacggaaaggcatggattggagtcaattggaatagaatcgaatggaatggcattgaatggaatggaatggaatgtacttgaatggaatggaatcgagcggaatagaagagaagggaatggcatcgaatggaatggaatggaatggaatgaaatgcacccaaatgtaatggactcgaatggaatatactcaaatagaatggactcaaaaggaatggtgtcaaacggaatttattcgaatagaatgtatttgaacggaatgcaatagcatggaatggaatcgaatggaatggatttaaatggaattgaccggaatggaatggactggaatagaacggactcgaataaaatggtttgcaatgtaaatgatttgaatgtaatggattcaaatggaatgtaatcaaatggaatggaatggtatgcaatgaaatggaatagaatggaatgcaataaaatggaacaaatggaataaagtggaatggaatagaatggaatggaatcgaatggaatggaatcaaatggaacggactggaatggaatggactcgaatggaatggattggaacaaaatggaattgaacagattggaattgacggaatggaatggaatggaatcgaatggaatggaattgaatgaaatcaaaaggaaaagaatgctatggagtgtaatggaaagatattgaatggaatggaatagaatggaatggactcgaatggaatggagtcgaatggaatggaataaaacggaatggaatcgaatggaatggatttgaatagactcgaaaggaatagaatggaatggagtttaatggaaagatatcaaatggaaaggaatggaatgcaatggactcgaatggaatagaaagcactggaatggacccgaatggaatggaaaggaatggaatggaatggaaagtaataaaatggaatggagtcagatggaacggaatggaatggaatggagtcgaatggaatagaatcgaaaggaatggcatcatatggaatggaatggaatggactcgaatggaatagaatcgaatagaatggtatggaatggaatggaatggaatggacacaaatgtaaagtactcgaatggaatggactcaaatagaatggactcgaaagaaatggttggaaatggaatctattagaatagaacggaatcgaatggaaagtaatagtatggaatgtaatcaaatggaatggaatagattggaatggactggaatggaatttactggaatagaatggacacgaatgtagtggattgcaatgtaattgattctaatggaatggaatcgaatgcaatggaatcgaatggaatggacgggaatggaatggacttgaatagaacggactcgaatgtaatgtattccgatgtatttgattcgaatggaatggagtcaaatggaatttagtcaaatggaatggaatgcaatggattggagtggaatggacaggaatggaatggcctcgaatggaatggacatgaatggaatggcatcgagtggaatggaatggaatggaacggaacggaatggaatggattggaatggacccaaatgtaatgctctcgaatggaatggactcaaatagagtggactcgaaagaaatggtctcgaatggaatctattcaactagaatggaatctattcaactagaatggaatagaaaggaatacaatagtatggaagggaatcgaatggaatgaaatcgaatggaatggaccagaatggaatggactggaaaagaacggactctaatgaaatggattgcaatgtaattgatttgaaagaattggaatcaaatggaatggaatcaaatggaatggaccagaatggaaaggagtggaatacaatggactcgaatgtagtggattgcaatttaattgattcgaaaggaatggaatcggatggaatttaatcaagtggaatggaatggaatgcaatggaatcaactaaaatggaatgcaatggaatggaacagattggaaacgactgcaatggaaacgaatggaacggaatcgaatggaatggaatctaacggtatggactggaatggaaagggctcgaatggaatggagtagcatggaatggaatcgaatggaacggaatcaaatggaatttaattgaatgtaaatgaaaggaatatagaggaatggagtttaatggaaagatatcgaatggaatggaatggaaaggaatagactcgaatggaatggaatggattcgaatgcaatggattggagtagaatgcactcgaatggaatggaaatgaatggaatggaaaggaatgcaatggaatggaatcggatggaatggaatgtaaaggaatggagtcgaatggaatagaatagaatggaatggcatcaaaaggaatggaatggaatggactcaaatggagtggactcgaatggaatagaatcgaatggaatcgcatcgaatggaatggaatggaacccagtggaatggaatggacccgaatgtaacggaatcgagtggaatggactaaaatagaatggactcgaaagaaatggtctgaaatggaatctattcgaatagaatggaattgaatggaatgcactagtatggaacggaatcaaattgaatggaattgattggaatggactggaatggaatggactggaatagaaaggacatgaatgtagtggattgcaatgtaactgattaaaatggaatggaatagaatggaatggaatcaaatgaaatggacgggaatggaatggacttgaatagaacggactcgaatgtaatgtattgcaatgtaattgattcgaatggaatggaatcggatggaatttaatcaaatggaatggaatggaatgcaatggactggaatagaatggaatgcaatggaatggaatggactggaatcgagtggaatggaattgaatggaatggaagcgaatgcaatggaatcaaatggaatggattggaatggaatggactcaaatggaatggactagaataaaaaggaatcgaacggattggaatcgaacggaatggaatggaatggaatggaatgcactcgaatggaatggaatcaaatggaattgaatagattgtaatggaatcaaatggaatggaattgaatggaaacgaaaggaattgaatggaaacgaaaggaatagaatggaatggagtgtaaaagacagatatcatatggaatggaatggaatggactcgaatggaatggactggaatggaatggtctcgaattgaatggacaggagtggaatggactcaaatggaaaggaaacgaatggaatggaatggaatgcaatggaatggaaaggaatagaatggaatggaatcggatggaatggaatggaagggaatggagacgaatggaatggaatcgaacggaatggcttcgaatcgaatggaatggactcgaatggaatggattcgaatggaatagaatcaaatggaatggtattgaatggaatcgaatggaaaggaatggaatagattcaaatgtaatggactcgaatttaaaggactcaaatagaatggactcgaaaggaatggtcaggaatggaatttattcgaacagaatggaattgaatggaaagcaatagtatggaatggaatcgaatggaatggaatagaaatggaattgaccggaatggaatggagtggaatagaaaggacttgaatgcaatggattgcaatgtaatagattcaaatggaatgggatcgaatggaatgtaatcaaatgcaagagaatcaaatgccatggaatgcaatagaatggaacacaatgcaatggaatagaagggaatgcactggaatggaacggagtggaatcgagtggagtggaatcgagtggaatggaatcgaatggaatggaatcaaatgtaatagaatcgaatggaatggactggaatgggatggtctcgaatggaatggactggaacaaaatggaatcaaacggataggaatggaatggaatggaatggaatggactcgaatggaatggagtcgaaaggaattgaatagaacgtaatggaatcaaatggaatggaattgaatggagacgaaaggaatagaatggaatggagtgtaatggacagatatcgtatggaatgaaagggaatggactcgaatggaatggtctggagtggaatggactggaacagaatggacagaagtcgaatggactcgaatggaatggaaacaaatggaatggaatggaatggaatggaatgcaaaggaatagaaggcaatggaaacagatataacgaaatggagtggaatggagtggaattggaatagaatccaatggaatggcatcaagtggaatggaatggaatggaatggaatggattcgaaaggaatggaatggaatggattcgaatggaatggacttgaatggaatagaatggaatggaatggcattgaatggaatggaacggaatggaatggatccaaatgtaatggactcgaatggaatggaaacgaatagaatggactcgaaagaaatggcctcgaatggaatttattcgaatagaatggaatcgaatggaatgaaatagtatggaatggaatagaatggaatggaatggaatggaatgcaccagaatggaatggactggaagaaaacggactcgaatgtaatggattgcaatgtaatcgattcgaatggaatggaatggaatgtaatggaatagaattgaatggactggaatggaatggactggaacagaatggtctcgaatgtaagagattgcaatgtaattggcttgaatggaatggaatcaaatggaatgtaatccaatggaatgaatggaattgaatgcaatggaatggaatagaatggaatggaatgcaatggaatggaacggagtggaatcgagtggaatggaatcgaatggcatggatttgaaaggaatggaatcgaatggaatggattggaatggaatgcactcgaatggaatggactgaaaaataatggaatcaaagagtttggaattgaatggaacggaaagcaatggaatggaagggactggaatggaaaggagtcaagtgtaatggaattgaatggagtggaatcaaatagaatgggattgaatggaatcaaaaggaatagaaaggaatggagtgtaatggaaagataacgaaaggaatggaatggaatggaatggactggaatggaatggactcgtatggaatggactggagaggaatggactcgaatgaatggaaaagaatggaatggaatggaatggaatggaatggaatggaatagaatggcatggaatgggatagaatggaatggaacgaaatggagtggaatggaggcaaatggaatagaatcaaatggaatggcattgaatggagtggaatggaatggaatggatccaaatgttatggactcgaatggaatggactcaaatagaatggactaaaaaggaatggtctcgaatggaatttattcgaatagaatggaatcaaacggaatgcaatagaatggaatggaatcgaattgaatggatttgaatagaatggacaggaatggaatggactggaatagaatggactcgaatgtaatggattgaaatctaattgatttgaatggaatggaatcgaatggaatgtaatcaaaaggaatggaatggaatgcaatggacaggaatagaatggaatgcaatggaatctaacagattggaatcgagtggaatggaatcgaatggaatggaatcgaatggaatggagtcgaatggaacggactggaacaaaatggaatcgaacggaatggactggaacaaaatcgaatcgaaaggataggaatcgaactgaaaggaatggaatggaatggaatggaacagaatctaaaggaatggagtcgaatggaatggaatcaaatggaatggaattaaatggaatggaattgaatggaatcaaaaggaatagaatggaaaggagtgtaatggaaagatatcaaatggaatggattggaatggaatggagtcgaatggaatggataggaatggaatggactagttggaatggaatggaggcgaatggacactaatggactggaaacgaatggaatggaatggaatgcaatggaatagaatggaaaggaatggaatggaatggaatcggatggaatggaagagaatggagtggaaagcaatagaatcaaatggaatggcatcgaatattatggaatggaatggacttgaatgtaatgtaatgtaatggaatggaatggtcccaaacgtaatggactcgaatgaaatggactcaaatagattggaatcgaaagcaatggtctcgaatggaatttattcgaatagaatggaatcaaatggaatgtaatagtaaaaaatggaatcgaatggaatggaatcgaatggaatggatcagaatcgaatggactggaatgaagaggactcgaatataatggattgcaatctatttgattcgaatggaattgaattgaatggaatgtaatcaaatggaaaagaattgaatgcaatggaatggaatagaatggaatgcaatggaatggaaaggaatggagtggaatccagtggaatggaatggaatggaatcaaaggaaatggaatcgaataaaatggacgtgggacaaaacggaatcgaatggattggaatcgaaaggaacagaatggaatggagtgtaatggactcaaatggaaaggagttgaatgtaatataatgtaatggaatgggttggagtgtaatagaaggatatcgaatggaacagaatgaaatggaatggactcgaatggaatggacgggagtggaatggaaacgaatggaatggaatgcaatggaatagaatggaatggaatggaatggaatgaaagcaatagaacggaacgaaatcagatggaacggaatgcaatggaatggtgtcgaatggaatagaatcgaatggaatggcatcagatggaatggaatggaatgaactcgaatagaatggactcgaatggaataaaaaagaacggaatggcatcgaatggaatggaatggaatggcatggaattgaatggacccaaatgtaatggacctaaatggaatggactcaaagagaatggactcgaaacgaatggtctcaaatggaattcattcaaatagaatcgaatcgaattgaatgaaatagtttgcaatggaatcaaatggaatggaagcgaatggaatggagcagaaaggaatggactggaatagaatggactcgaatgtaaaggattgcaatgtaatagattcgaatggaatggaaacgaatggaatataataaaatggaaaggattggaatgcaatggaatgaaatagaatggaatgcaatagaatggaatggagtggaatcgagaggaatggaattcaatggaatggaattgacaggaacaatatggaaatgaacggattggaatcacaaggaacggaatggaatgaaatggaatggaatatactcaaatgaaatggaacatacacgaatggaatggagtcaaatggagtggaatcaaatagaatggaatcaaatagaatggaaatgaatggaatcaaaaggaatagaatggaatggagtctaagggaaagatattgaatggaatggaatggcatagaatggaatcaaatggaatggactggaatggggcggactctaatggaatgcactggagtggaatggaattgaacggaatggaaaagaatggaatggaatggaatggaagggaaaacaatagaatggaaaggaatcggatggaacggaatggaatggaatacagtcaaatggaatagaatcgaatggaatggcatcgaatggaatggaatggaatggattcgaatggaatggactcgaatggaataaaatcaaattgaatggcatcgaatggaatggaaattaatggaatggacacaaatgtaatgtacttgaatggcaataaatcaaatagaatggaattgaaagaaatgatctcggatggaatttatgcgagtagaatggaatcgaaaggaattcaatagtatggaatgcaattgaatggaatggaatcgattggaatggactggagtaaaaaagagtagaatgcaatggattgcaatgtaattgattcgaatagaatggaatcaaatggaatggaaacgaatggaatgcaccggaatggaatggacacgactagaaggactcgaatgtaatggattgcaatgtaatttattcaaatgcaatggaatcgattgtaatgtaatctaattgattggaatggaaatcaatggaatcgaatagaatgcaatgcaatggaatggaacagagtggaatcgactggaatggaatcaaatggaatggaattgaaggaatggaatcgactggaacggactggaatggaatggaatcgaatggaatggacaggaacaaaatggaatggaatggattggaatcgaatggaacggaatggaatggaattgaatggaatggactcgaatggaatggagccgaatggaatggaaccgaatggaatggaatccaatggaatggaactgaatggaatctaaaggaatagaatggaatggagtgcaaagtaaagatatcgaatggaatggaatggagtggaacggactcaaatggaatggaaataaatggaatagatttgaaaggaatagcatggaatggaatgggatggaatggaatgaaatggaatggaatggaatgcaatggagtcaaatggaatagaatagaatgggatggcattaaacagaatggaatggaatggactcgaatggaatggacccgaatggaatagaatagaatggaatgcaatcgaattgaatggaatggaatggtttggaatggaatggaatggacccaaaggtaatgggctcgaatggaatggactcaaataaaatgaaatcgaaaggaatggtatcgaatggaatttattcaaatagatttgaatcgaatagaatgaaacagtatggaatgggattgaatggaatggaatcgaattgtatggaccggaatagaattgactggaatagattggaatgtgattgattcgaatggaatggaatcgaatggaaagtaatcaaatggaatggaatggaatgcaaagaatggattagaatggaatgcaatggaatggaacgggacggagtggaattgagtggaatggaatcgaattaaatggaatcgaatggaatagaatcaaatggaatggactagaatggaatcaacctgggacaaaaaggaatccaacgaattggaatcgaattggaaaaagtgaaattgaatggaatggacccgaatggaatggagtcgaatggaatgggatgtaatggaatggaatcaaatggaatggaattgaatggaatggaattgaatggaattaagtatagtggaaagatatcgaatggaatgaaatggaatggactcgaatggaatggactggaatggaatggacgagaatggaatggagtggaattgactcgaatgtaatggaaacgactggaatggaatggaaaataatataatggaatggaatcggatggaacagaatggaatgtaatggagccgaatgaaataggatcgaatggattggcatcaaatggaatggaatggagtggaaaggactcaaatggaaaggattcgaatgggatagaatacactggaatgctgtcaaatggattggaatgcaatggaatggaatggacccaaatgtaatggactcaaatggaatggactcaaatagaatggacatgaaaggaatgggctcaaatggaattcattcgaatagaatcgaatcgaatggaatgcagtagtattgaatggaatcgaaaggaatagaatcagatggaatggaccggaatggaatggactggaatagagcggacttgaatataatggatggtaatgtaattgattcgaatggaatataatcgagtggaatgtaatccaatggaatggaatggaaaccaatggaatgcaatggaatgcaatagaatgcaatgcaatggaatggaatggaattgaggggtatcatgtggaagggaatcgaatagaatggaattgaatagaatggaatcgaatggaatggacaggaatggaatggactcaaatggaatggactgaaaaaaaaggattggaatggattggaatcaaacttaatggaatggagtggaatggattggaatggactcgaatggaatggagtcgaatggaaaggaaccgaatggaaagcaatcaaatggaatggaattgaatggaatcaaaaggaatagaatggaatggggtgcaaaggaaagttatcaaatgaaatggaattgaatggaatggaaaggaatggacttgaatggaatggactggagtggaatggacttgaatggaatgggctggagtggaatggacttgaatgaaaaggaaacgaatggaatggaatggaaaggaatagactggaatggaatgggacggaacagaaaggaatggaatagaatagaatggagttgaatggaatataatcgaatggaatggcatcaagggaatggaatggaatggactcgaatggaatggaatcgaatggagtagaatcgaaaggaatggcattgaatagaatggaattgaatgaaatggaatggacccaaatgtaatggactcaaacggaatgcactcaaatagaatggactcgaaagcaatggtctcgtaaggaatttattcaaatagaatggaatcgaatggaattaaatagtattgaatggaatcaaatggaatggaatcgaattgaatggaccagaatggaatggactggaatagaacagactcgaatgtaatggactgcaatgtgattgattcgaatggaatggaaacgaatggaatggaatggaatacaaaggaatggattagaatggaatgcaatgtaatggaacggaatggagtggaatcaagtggaatggaatcgaatagaatataatcgaatggaatggaatcgaatgtaatggatttgaatgggatggatttgggaccaagtggaatcgaacggattggaatccaacggaacagaatgaaatggtatggaatagaatggacccgaatggaacggaatcaaatggaatggaatcgaatggaatggatttgaatggagtggattgaatggaatggaattgaatggaatggagtgtgatggaaggatatcgaatggaatggaatggaatggactcgaatggaatggactggaatggaacggtctggaatgaaatggacaggagaggaatggactcgaatggaatggactggagtggaatggaatcaaatggaatgcaaacgaatggaatggaatggaaagaattataatggaatggaatcggatggaacggaatggaatgtaatggagttgaaaggaatagaatcgaatggaatggcatcgaatggaatggcatcaaatggaatgggatggaatgaaatggagtggaatggattcaaatggaatggattcgaatggaatataatagaatggaatgccatcaaacggaatggaatggaatggaatggaattgacccaaatgtgatggactcaaatggaatgcactcaaatagaatggacttgaaaggaatgggttcgaacggaattcatttgaatagaattgaatggaatggaatgcagtagtattgaatggaatcgaatggaatggaattgaatggaatggacaggaatggaatggactggaatagagtggactcgaatgtaatagattgcaaagtaagtggttcaaatggaatggaatcgattggaatgtaatccaattgattggaatggaaatcaatggtattgaatagaatgcactgcaatggaatggaatggagtggaatcgactggaatggaatcgactggaatggaatcgaatggaatggaattgaatggaatggaatcgaaaggaatggactggaatagaatggaatcgaatagaatggacaggaacaaaatgaaatggaatggattggaatggaatggaatggaatggaatggaatggaaaggactcgaatggaatggagtcaaatggaatggaaccgaatggaatggaatttaatggaatggaaatgaatggaatctaaaggaatagaatggaatggagtgcaatgtaaagatatccaatggaatggaatggattggactcaaatggaatggactggaatggtcagtaaaggaatggactggagtggagaggacttgaagggaacggtctggataggaatggactcgaatggaatggaaatgaatggaatggaatggaaaggaatatcctggaatggaatgggatggaatggaatggaatggaatggaatggagtcgaatggaatagaatcgaatggaatggcatcaagctgaatggcatggaatggactcgaatggaatggacccaaatggaatagcatagaatggaatccaatcgaatagaattaaatggaatggattggaatggaatggaatggaatgggcccaaagaaatgggctcgaatagaatggactcagatagaatgaactcaaaaggaatggtctcgaatggaatttattcgaatagaattgaatcaaatggaatgaaacagtatggaatgggatcgaatggaatgggatcaaatcaatggaatcgaattgtatggactggaatagaatggactggaatagactggactcgaatttaatggattgcaatgtgattgattcaaatggaatggaatcgaatggaaagtaatcaaatggaattaaatggaatgcaaaggaatggattagaatggaatacaatggaatggaaaggaacagagtagaatcgagtggaatggaatcgagtggaatggaatcgaattgaatggaatcgaatggaatggactcgaatggaattgatatgggacaaaaaggaatcgaatggattggaatcgaattgaaaggaatgaaattgaatggaatggacccgaatggagtggagtcgaatggaatgagatctaatggaatggaatcaaatggaatggaattgaatggaatgcagtataaaggaaaggaatggaatggacttgaatggaatggactggaatggaatggactagaatggaatggactgctgtggaatggactaaaatggaatggactggagtggaatggactcgaatggaatggaaacgactgtaatggaatggaaaataatataatggaatggaataagatggaacggaatgtaatgtaatggagtcgaatgaaatagaatcaaatggaatggcatcaaatggaatggaatggaatggagtggaatggactcgaatggaatggattcgaatgggatagaatagactggaatgctatcaaatggattggaatggaatggaatggaatggacccaaatgtaatggactcaaatagaatggacttgaaaggaatgggctcgaatggaattcattcgaatagaatcgaatcgaatggaatgcagtagtattgaatggaattgaatggaatggaatggaccagaatggaatgaattggaataaagcggactcgaatgaaatggattgtaatgtaatagattcgaatggaatataatcgagtggaatgtaatccaatggaatggaatggaaaccaacggaatgcaatagaattcaatgcaatggaatggaatggaggggaaacgtgtggaatggaatcgaatggaatggaatcggatggaatggactggaatggaatggactcaaatggaatggactgaaacaaaatggattggaatggattggcatcgaatggaacagaatggagtggaatggattggaatggactcgaaaggaatggagttgaatggaaaggaaccgaatcgaaagcaatcaaatggaatggaattgaatggaattgaaaggaatagaatggaatggggtgcaaaggaaagttatcaaatggaatggaaatgaatggattggacaagaatggacttgaatggaatggactggagtggaatggacttgaatggaatgggctggagtggaatggactcaaatgaaaatgaaacgaatggaatcgaatggaaaggaatagactggaatggaatgggatggaacggaaaggaatggaatggagtgcaaaggaagatatcgaatggaacagaatgaaatgatttggaatggaatggagtcgaatggaatggaatcgaatggaatggaatcgaatggaatggaattgaatggaatggaattgaatggaatggagtgcaaaggaagatatcgaatggaatggaatggactcgaatggaatggacaggagtggaatggactcgaatggaatggactggagtggaatggactcgaatggaatagaaaagaatggaatggaatggaaaggattataatggaatggaattggagggaactgaatgtaatgtaatggagtcaaaaggaatagaatcgaatggaatggcaacaaatggaatggaatggaatggaatggactcgaaaggaatggattctcattttatacagtcgaatgcaatggcatagaatggaatgtaatgcaatagcatggaatggaatggacacaactgtaatgtactccaatggaatggactccaatacaatggattctaaaggaatgggctcgaatggaattctttcgagtagaattgaatcgaatggaatgcaatagtattgaatggaatagaatggaatggaatagaatggaatggaattgaatggaatggaagggaatggaatggactggaaaagagtagacacgaatgtaatgaattgcaatgtaatagattcgaaaggaatggaatcgaatggaatggaaacgaatggaatggcattgaatggaatggaaaggaatggaatggaatggaatggaatggacccaaatgtaatggactcgaaaggaatggactcaaacagaatggactcaaaaggaatggtctcgaagggaatttattcgaatagaatggaatcgtatggaatgcaatagtatggaatggaatcgaatggaattgaatcgaatggaatggaatcgaatggaatggactggaatggaatggactggaatagaatggactcgaaagtagtggattgcaaagtaatagatttgaatggaatggaattgaatggaatataatcaaatggaaaggaatggaatacaatggaatgcaatggaatggaatggagaggaatcgagtggaatggaatcgaatggaattgaatggaatggaatgcaatagaatagaatggaattgaatggaatcgaaaggaatagaatggaatggagcgcaatggaaagatatccaatggaatggaatggaatggaattgactcgaatggaatggactggaatggaatggactccaatggaatgggcaggattggaatggactcaaatgtaatggaaacgaatggaatataatggaacagaaaggaatagagtggaatggaatctgatggaatggaaaggaatggaatggagtcgaatggaatacagtcaaatggaatggcttcgaatggaatggaatggaatgcactcaaatcgaatggactcgaatggaatagaatcaaaaggaatggtatcgaatggaatggagtggaatggtttggaatggacccaaatgtaatggactcgaatggaatggacacatatagaatggacttgaaagcaatggtctcgaatggtatttatttgaatagaatggaatcgaatggaatgcaatagtatggaatgaaatctaatggaatggaaacgaatggaatggaccggaatggaatggactggaatagaacagactcgaatgtaatggattgcaatgtaattgatacgaatggaatggaatagaatgacatggaatggaaatgaatggaatggaatggaatggaatagaatggaatggaattggatggaacgaaatggaatgcaatgaagtcgaatggaatataatcaaaaagaatggcatggaatggaatggactcgaatggaatagactctaatgtaatagaatagaatggaatggcattgaatggaatggtatggaatgtaatggacccaaatgtaatggagttcaatggaatggactcaaatagaatggactagaaaaaaatggtctccagtggaatttattcggatagaatggaattgaatggaatgcaatagtatggaatggaattgaatggaatggaaccgaatggaatggaccagaatggaatggactggaatagaacagactcgactgtaatggattgctatttaatagattcgaatggaatggaatcaaaaggaatgtaatcaaatggaatggaatggaattcaatggaaaggaatagaatggaatttaacgaaatggaatagaatggaattcaatggaaagaacgaattggcatggggtggaatggaatcgaattgaatggaatcaaatggaatggaatcgaatggaatggactggaatggaatggacacgaatggaagggacaggaacaaaattgaatcgaactgattggaaaagaaccaaaataatggaatggaatggaatggaatggaatggagtcaaatggaatggaatcgaaaggaatggaaccgaaaggaatggaattgaatggaatcaaaaggattagaacagaatggagtgtaatggaaaaatatcgaatgtaatggaatggaatagaatggcctcgagtggaatggactggaatggaaagcactcaaatggaatggactggaatggaatggcctcgaacacaatagaaacgaatggaatggaatggaattggacggaatggaatggaatggattggaaaggaatagaatggaatggattcagatgcaacagaatggaacggaatggagttgaatggaatagaaccgaatgcaatgccatcaaatggaatggaatggaatggaatcgaatggaatggactcgaatggaatagaaacgaaaggaatggcattgaatggaatggaatggaatggaccaaaatgtactggaccctaatggaatggacacaaatagaatggattcgaaaggaatggcctcgaaaagaatttattggaatagaatggaatcgaatggaatgcaatagtatggaatggaatcgaatggaatggaatcgaatggaatggactggaatgaaatggaaaggaatagagtggacacgaatgtaatggattgcaatgtaattgattcgaatggaatggaatcaaatggaatgtaatcaaatggaatggaatggaatgcaatggaatggaataaaatggaatggaatggaatataatggaatgcaatggaatggaaagaagtggaatcgaatggaatggaatcaaatgaaatggaatccagtggaatggaatcgaatggaatggactgaaatggaatggactcgaatgtaatgaactggaagaaaatggaatcaaacggattgtaatcgaacggaacagaatagaatggaatggaagagaatggactcgaacggaatggtgtcgaatggaatgtaatcgaaaggaatggaattgaatggagttgaaaagaatagaatggaatggaatggaatggcatcgaatggaatggaatggactccaatggaatggagtcgaatggaatagaatgaaatggaatggaatggcatcgaatggaatggattggaatggacccaaatgtaatggactcgacaggaatggtctcaactagaatgaactcgaaaggaattgtctcggatggaatttattcaaatagaatggaaacgaatggaatgcaatagtatgaaattgaattgaatggtagggaatcacatggaatggaccggaatggaatagactggaatacaatggacttgaatgtcatggattgcaatgcaattgatttgagtggaatagaatcgaaaggaaagtaatgaaatggaatggaatggaatgcaatagaatggtatagaatggaatgcaatggaatggaatggagtggaatccagtggaatggaatagaatggaatgggatcaaatggtatggaatcgaatggaatggactggaatggaaaggactcaaatggaatggactggaacaaaatggaatcgaacggaatggaacagaaaggaatggaatggaatggaatggaatcgaatggaatggagttgaatggaatgcaatctaatggaatggaatcaaacagaatgaaagtgaatggaattgaaaggaatagaatggaatggagtgtagtggaaagacaatgaatggaatggaaaggaatggaatggactggaaaggaatggactggaatggaaaggacccgaatggaatggactggagtggaatgcccacgaatagaatggaaatgaatggaatggaaagaattggatgagaatggaacagaaaggaatataatggaatgctattgcagagaacggaatggaatggagtcgaatggaatagaatcgaatggaatggcaagaaatggaatggaatgaaatggaatagaatggaatggaataaaataggatggagcgaagtggaatgcaactgagtcgaatggaatagaatccattggaatgacatcgaatggaatggaatggaatggacttgaatggaatggagtcaaatagaatagaatcaaatggaatggcattgaaaggaatggaatggattgagatggaatggactccaatgaaatgcactcgaatggaatagattcgaatggaatggcatcgaatggaatgaatatgaatgttgtggaatggacccaaaagtaatggactcgtatggaatggactcaaagataatggactcgaaaggaatggtctccaaagaaatttattcgaaaagaaaggaatcgaatggaatgcaatattatggaaaggaatcaaatggaacggaattgaaaggaatggaccagaatggaatggactggaatagaacggacttgaaagtaatggactgcaatgtaattgattcgaatggaaaggaattgaatggaatggaatcaaagggaatggaaagtaatgcaatggaatggaatagaatggaatgcaatggaatgggacagtgcagaatcgagtggaatggaatcgaatggaatggaattgattggaatggaatcgattggaatggacttgaatggagtggactcgaatggaatgaactggaacaaaatggaatcgaacggattggaatcgaacaaaacggaaaggaatggaatggaatggcctcgaaaagaatggagtcgaatggaatggaattgaatggaatggaattgaattgaatgcaaatgaatggaattgaaaagattagaatgaagtgcagtgtaatggaaagatatcgaatgcaatggaatggaatggaatcaaatggaacggactggaatggaatggacttgaatggaatggaccggagtgcaatggactcgagtggaatggaaacgaatgtaatggaatgtaatggaatgaaatggaaaggaatagaatggaatagaatcggatggaacggaacggaatggaatggatttgaatggaatagaattgaatggaatgtcatcgaatggaatggaatggaatggaaaggactagaatggaatggactcgaagggaatagaatagaatggaatggcagcgaagggaatggattggaatggaatggaatggacccaaattcaatggactcaaatggaatggtctcatatagaagggcctcgaaaggaatggtctcgaatggaaattattccaatggaatggaatcgaatgtagggcaataatagggaatggaattgagtggaatcgatttgaatggaattgacccgaatggaatggaatgcaatagaacagacttgaatgtaagggattgcaatgtaattgattcgaatggaatggatccaatggaatgtaatcaaatggagttgaatggaatgcaatggaatggaatggaacggattggaatagagaggaatggaatcgaacagaaaggaatcgaatggaatagactggaatggaatgtactcgaatgaaatggactggaataaaatggaattgaaaggattggaatggaatggaatgtaatggaatggactcgaattgaatggagtcgaatggaatggaaccgaatggaatggaattgaatggaatcaaaatgaatagaatggaatagagtgtaatggaaagatatcgaaaggaatggaatggaatggactcgggaggaatggactgaaatggaatggactcgaatggaattcactggaatggaatggactccaacggaatggaaacgaatggaatggaatggaagggaatggaagtaatagaatggaatggaatcggatggaatggaatggaatggagtcgaatggaatagaatcgaatggaatggcatcagatggaatgaatggaatggactcgaatggaatgtattcgaatggaatataaaacaacggaatggcatcgaatggaatgggatggaatggtatggaattgaaaggacccaaatgtaatggacataaatggaatgcactcaaatagaatggactccaaaggaatggtctcgaatggaattcattcaaatagaatcaaatcgaatcgaatgaaacactttggaatggaattgaatggaatggaccagaaaggaatggactccaatagaacggagttgaatgtaatggattgcaatgtaattgattcgaacagaatggaaaggaatggaatataatcaaatggaaaggaatggaatgcaatggaatggaatacaatggaatgcaatagaacggaacggagtggaattgagaggaattgaatcgaatggaatggaattgagtggaacaaaatggaaatgaacggattggaatggaatggaatggaatggaatggaatggaatggagtggaacatacttgaatggaatggaaacaaatggagtgtaattgaaaggaatggaatcgaatggaatggaattgaatggaatcaaaaggaataggatggaatggaggggaatggaaagatatcgaatgaaatggaatggaatggagtcgaatggaatggactggaatggaatgtactcgaatgaaatggaatcgatttgaatgtaatccaatggattggaatggaatagaatgcaatgcaatggaatggaatggaggggaatcgactggaatggaattgattggaatgaaattgactggaatggaatggaatggactcgaatgaaatggactggatcaaaatggaatggaatggattggaatcgaaaggaacggaagggaatggaacggaatggaatggaatgcactcgaatggaatggagtcgcatggaatggaaccgaatggaatggaatcgaatggaatggaactgaatggaatctaaaggaatagaacggaatggattgcaatgtaaatatatcgaatggaatggaatggaatggaatggactcgaatgtaatggactggaatgtacagtaaaggaatggactggagtggaaaggacttaaaggggatggtctggagtggaatggactcgaatggaatggactcaaatagaatggacacgaaaggaatggtctcgaatggaattttttcgaatagaatggaaccgattggaatgaaatagtattgaatggaatggaatggaatgcaatcgaattgaatagactggaatggaatggactggaatagaacagactcgaacgttacggattgcaatgtgattgattcgaatggaatggaatcgaatggaatgtaatcaaattgaatggaatggaatacaaaggaatggaatagaatggaatggaatgtaatggaacggaaaagagtggaatcgagtggaatggaattgaatggaatagaatcgaatggaatggaatcgaatggaatggattcgaatggaatggacttgggacaaaatggaatcaaacggattggaattgaacggaagggaatgaaaatgtatggaatggaatggactagaatggagtggagtcgaatggaatggaatcgaatggaatggagttgaatggagtggaattgaatggaatggaattgaatgtcatggagcgcaatggaaagatatcaaatggaatgcaatgcaatggagtggaatggaatggactcgaaaggaatggactagaatcgaatggacatgagtgaaatggactcgaatggaatggactggagtgaaatagagtcgaatggaatggaaacgaatggagtggaatggaaagaaatataatggaatggaatcggatggaatggaatggaatgcaatggagtcgaatgaaatagaatcgaatggaatggaatcaaatggaatggaatggattggaatggcatggaatggacttgaatggaatggattcgaatggaataaaatagaatggaatgcaattgaatggattggaatggaatggaatggaccctaatataatggattcaaatggaacggattgaaatagaatggacttgaaaggaagggactcaaatggaactcattcgaatagaattgaatcgaattgaatgcggtagtattgaatggaatcaaatagaattgaatcgaatggaatggactggaacggaatggactggaatagagtggactcgaatgaaatggattgcaatataattgatttgaatggaatggaatcgaatggaatgtcatccaatggaatggaatggaaaccaatggaatgcaatagaatgcaaggcaatggagtggaatcaggtggaatggaatcgaatggaatggaattgaatggaatggattcgaatggaatggactggaatggaatggactcgaatggaatggactggaataaaatggattggaatcgaatggaacggaatggagtggaatggaatggaatggactcgaaaggaatgaagtcgagtggattggaaccgaatggaatgcaatagaatggaatggaattgaatggaatataatggaatagaatggaatggagtgcaatggaaatttatcgaatggaatgaaattgaattgaattgactggaatggactcgaatggaatggactggagtggaatggacttgaatggaattggctggagtggaatggattcgaatggaatggaaacgaatggaatggaatggaaaggagtagactgggatggaatggaatggaatggaacggaacggaatggagtcaaatggaatagaatcgagtggaatggcatccaatgtaatggaatggaatggactcgaatggaatagaatcgaaacaaatggcatcaaatggaatgttattgaatgaaatggaatggaatggacccaaatgtaatggcctcgaatggagtggactcaaagagaacggactcgaaaggaatggtcttgaatggaatttatttgaatagaatggaatcaaatggaatgaaatagtattgaatggaagcaaaaggaatggaatcgagttgaatggaccagaatggaatggactggaatagaaaggactagaatgtaatggactataatgtgattgattcgaatggaatggaatcgaggggaatgtaatcgaatggaaaggaatgcaaaggaatggaatagaatggaatggaatgcaatggaacagaacggagtggaatcgagtggaatggaatcaaatggaatggattcgaatgaaatggactcgtgaaaaatggaatcgtgacaaaatggaatcaaatggattggtatcgaatggaacagaatgaaatggtttggaatggaagggactcgaatggaatggactggaatcaaaaggattcgactggcatggattggagtggaatggactccaatggaacggaaatgaatggaatggaatggaacgaatagaatggaatgaaaccggatttaatggaatggaatggattggaatcgaatgggatagaatcaaatggaatggcagcaaatgtaatgtaatgaaatgtaatggaataaaacggaatggatttgaatggaatagaatcgaatgaaatgtcatcaagtggaatggaataaaacggaatggatttgaatggaatagaatcgaatgaaatgtcatcaaatggaatggaaatgaatggaaatgaatggaatggaatggaccaaaatgtaatggactttaatggaatggactcaaatagaatggattcaaatggaatggtctcaaatggaatttagtcgaatagaatggaactgaatggaatgcaaaagcatggaatggaattgaatgtaatggaatagaatggaatggaccagaatgcaatggacaggaatagaatggactcgaatgtaatggattgcactgtaattgactcgaatggaatggaatcgaatggaatgtggtcaaatggaatggaatggaaagcaatggaatggaatagaacggaatgcaatggaatggaacagagtggaatcgagtggaatggaatcaaaagaagtggaatcagacggaacggaatggaatggaatggagtcgaatggaatagagtcgaatggaagggcatcaaatggattggaaaggaatggaatggaatggactcgaatggaatggactcgaatggaatagaatcgattggaatggcatcgaatggaatggacacaaatgtaatggactctaatagaatggtctcaaatataatggactcgaaagaaattgtctcgaatggaatttattcaaatggaatggaatcgaatggaatgcaatagaatgaaatggaatcgaatggaatggaatcaaatggaatggaacggaatggaatggaatggaatagaatggactcagttgtaatggattgtaatgcaattgattcgaatggaatggaatcgaacggaaaggaatggaaaggaccggaatggaatggactagaatagaacagactcgaacgtaatggattgcaatgtaattgactcgaatgaaatggcatcgaatggaatgtaatcaaatcgaatagaatgtaatgcaatggaatgtaatacactggaatgtaacagaatggaacagaatgggatgtaatggaatagaaaggattggaatcgagtggaatgaaatcgaatggaatggactggaacggaatggacttgaatggaatgcaccggaaagaaatggaatggaaaggagtggaatagaacggaatggaatggaatggactcgaatggaatggagtcgaatgacatggaattgaatctaagggaatcaaaaggaatggaatcaaatggaatggaattgaatgtaattgaaagaatagaatggaatggagtgtaatggaaagatatcaaatggaatggaatggaaccgaatagaatggacggaaatggaatggactcgaatgacatggactggagaggagtggactcgaatggaaaggaaatgaatggattggaatggaatggaatgaataggaaggaatggaatgggatggaatggaatggagtggattggaatagaatggaatagaatcgaacggaatggcatagaatggaatggaatggaatggaatggcctcgaattgaatggactcgaatggaatagaatagaatggaatggcatcgaatggaatggaaaagaatggaatggagtggaacaaaatgtaatggaccctaatggaatggactcaaatagaacggatttaaaaggaaaggtctcgaatggaatttactccaatagaatgtaatcgaatgtaatgcaatagtatggaatgtaatcaatggtaaggaatggaatggaatgcactggaatagaacggactcgaatgaaatggatggcaatgtaattgattcaaaagtaatggaatcgaatggaatgtaaccaaatggaatggaatggaatgcaatggaatggaatacaatggaatgcaatggaatggaacagagtggaatcgagtagaatggaatcgaatggaatggaatctaaaggaatggactcgaatggaatggaatggaatggagtgaactcgaatgaaatagaatggagtggaaaggacacgaatggaatggaaacgaatggaatggaaaggaaaggaatagaattgaaagaaatttcatggaacggaatagaatggaatggaatagaatggaatggacttgaatggaatagagtaaaatggaatggaatggaatcgaatggaatggaattcaatggaatcaaaaggaatagaatggaatgaagtgtaagggaaatttatcaaatggaatggaatggaatggactccagtggaatgacctggaatgtaatggactcataaggaatgggctggagtggaatggactcgaatggaatggaaacgattggaatggaatggaatagaaaagaatagaatggaatggaatacgatggaaagtaatggaatggaatggtgccaaatggaatagaatcgaatggaatggcatccattcaaatggaaaggaatggaatggaatggactcgaatggaatggaatagaatgggatagaatcaaattgattggcatcaaattgaatggaatgcaatggaatgcaatggaatgcaatggaatggaattgaccaaaatgtaatggattataatggaatggaatggaatggaatggaatggactcgaatggaacagagtcaaatggattggcatcgaattgaatggaatgcaatggaatggaattgaccaaaatgtcatggactagaatgcaatggactcaaacagaatggacttgaaaataatggtctggaatggaattcattcgaatagaatggaatcgaatggaatgcaatagtatggaatggaatcgaacggaatggaatataatggaatggatcagaatggaatggactggaatagaatggactcgaatgaaatggattgcaatgtaattgattcgaatgcattggaatcgaatggaatgtaatcaaatggaaaagaaaggaaagaaatcgaatggaagagaatggaatgaaatggaatggaatttagtggaatggactggaatggaatcgaatggaatggaatgtagtacaatggaatggaatcgaatggaatggactggaatggaatcgaattgaatcgtatggactcgaatggaatggaatagaacaaaatggaatcaaacggattggaattgaaaggaacagaaggaacagaatggaatagaatggactcaaatggaatagagtcgaatggaatggaatcaaatggaatggaatagaatggaatggaattgaatggaattgaaaggaatagaatggaatggagtgtaatggaaagatatcgaatggaatggactgtaatggaatagcctccaatggaatggactgaagtggaatggactcgaatggaatgcaaaggaatggattggaatagaatgtaatggaatggaaaggaaaggaaaagaatggaatggagtctgatggaacggaatggaatggaaaggtgtcaaatggaatagaattcaatggaattgcattgaattgaatggaatggaattgaatggaatggaatggactccaatgtaatggacccgaatggaatagaatcaaaaggaatggcatcaaaaggaatggaatggaatggaactgtcccaaatgtaatggactagagtggaatggactcaaatagaatggactcaaaaagaaagggctcgaagggaatttattccaatagaatggaatcgaatggaatgcaatagtatggagtggaatttaatgaaatggaattgaatgcaatgtaccggaatggaatggactggaatagaacggattcgaatgtaatggattgcaatgaaatggatgcgaatggaatggaatcgaatggaatgtaatcaaatggaatggattgaaatgcaatggaatggaatagaatggaatgcaatggaatggaagtgagtggaatcgagtggaatggaatcgaatgaaatggattcgaatggaatggactcgaatggaatggactggaacaaaatggaatcgaactgattggaaacgaaaggaactgaatggattagaaaggaatggaatggactcgaatggaatggagtcgaatggaatggaaccgaatggaaaggaatcgaatggaatggtattgtatgcaatcaaaaggaatagaatggaatggagtgtaacagaaagacatcgaatagaaacaaatggaatggaatggactctaatggaatggactggaatggaatggactcgaatggaatggacatgagtggaaaagactcgaatggaatggaaatgaatggaatggaatggaaaggaatagaatgcaatggaatcagatcgaacagaatggaatggaatggagttgaatggaatagatttgaatgaaatgccatcgaatggaatggaatggaatggattggactcaaatggaaaagaatcgaatggaatggaatggaacggaattgaatggactcgaaaggaaaagactggaatggaatggactcgaatggaatgaagtggagtggaatggactcgaatggaatggaaactaatggaatggaatggaacggaattgaatggaatggaaaggaatggaaaggaaaaaatggaaaacaatctgatggaatggaatggaatggaagctaccaaaacgtaatggacactaatgcaatggacacaaatagaatggacacaaaaggaagggtctcgaatggaatttattcaaaaagaatggaatcgaatcgcatgtgatagtatggaatggaatcgaatggaatggaatcaattggaatggaccagaatggaatggactggactacaacggactcaaatgtaacggattgcaatgtattttattcgaaaggaatggaatcgaatggaatgtaatcaaatggaatgaattgcagtgcaatggaatggaatagagtggaatgcaatggaatggaacggagtggaatcgagtggaatggaatcgaatggaatggaatcaaatggaatgcactgcaattcaatggagttgattggaaaggactggaacaaaatagaatcgaacgaattggaatcgaacgcaatggaatggaatggaatggaaaagaatggacgtcaagaaatggagtcgaacggaatggaactgaatggaatggaattgaatggaatcaaaaggaatagaatagaatggagcgtaatggaaagatatcgaatgggatggaaaggagtggaaatgactccaatggaatggtctggaatgaaaaggactcgaatggaatggactggaaagaagtagacttgaatggaatggactggagtggaatggacttgaaagcaaagaaaatgaattgaatggaaaggaatagaatggaaaggaatataatgtaatggaatcagatggaacggaatggaatgaaatggagtcgaatggaatggcattggatagaatgcaatggaatggaatctaatgaacttgaatggaatggactcgaatgcaatagaatagaatggaatggcatcgaatggaatggaatggaagggagtgtaatggaaagatgtcaaatggaatggaatgaactcgaatggaagggactggaatggaatggactcgaatggaatagattggagtggaatggtctcaaatggaatggaaacaaatggaatggaattgaatggaatggaatttaaaggaataaaattgaaggaatcggatggaatggaatggaacagaagagagtccaatggaatagaatcgaatggaatgacattgaatggaatggaatggaaaggaatcgaaaggaaaggaatcgaaaggaaagactcgaatggaaaggactcgaatggaattgaacacaatggaatgagatcgaatggaatggaatggaagggagtgtaatggaaagatatcgaatggaatggaatggaatagaatggaatggcctggaatggattggactccaatggaatggactggagtggaatggactcgaatggaaaggaaacgaattgaacagaatggaatgtaatgcaaacaatataatggaattgaatcggatggaaatgaatggaaaggaatggagtcgaatggaatagaatcgaattgaatgacatcgaatggaatggaaaggactcgaaaggtgtggactcgaatggaatagaatcaaaaggaatgacatccaatggaatggaatgtaatggaatggaccccaatgtaatggactcgaatggaacagactcaaatagaatggatttgaaaggagtggtctctaatggaatttattcaaatagaatggaatcaaatggaattcaatagaatggaatggaattgaatggaatggaattgaatggaatggaccagaatggaatggagtggataagaacggactcgattgtaatggattgcaatgtaattgtttcgaatggaatggaatcaaacggattttaatcaaatggaatggaatggaataaaatggaatggaatagaatggtatgcaatggaatggaatggagtggaatcgagttgaatggaatggagtggaatcaagttgaatggaatggagttgaatggaatggactggaatggaggggactcgaatggaatggactggaagaaaatggaatcaaacggaattgaatcgaatagaaacgaatggaatggaaaggactcgattggaatgaattcgaatggaatggaattgaatgtaatggaatcgaatagaatggaactgaacggaattgaaaggaatagaatggaatggagtgtaatggaaagattttgaatgcaatggaatggaattgaaaggacttgatggaatggactggaatggaattgactcgaatggaatggactggagaggaatggacttcaatggaatggaaacgaataaaatttaaatggaatggaatggaatggaatggaaaggaaaggaacagaatggaatggagtcggatggaatggaatgacatggaatcgagtcgaaaggaaaagaatcgaatggaatgccatcgaatggaatggaatggaatggactcgaatggaaaggactcaaatggtatagaatggaatgaaatggcaacgaattgaatgtaacggaatggaatttacccaaatgtaatgtactcaaatggtatagaatggaatgaaatggcaatgaattgaatgtaacggaatggaatttacccaaatgtaatggactcgactggaatggattcaaatagaatggactcgaaaggaatgttctcaaaaggaatttattcaaatagaatggaatcgaatggagtgcaatagtatggaatgggatcaaatggaatggaatcgaatggaatggaccagaatggattggactggaacagaacggactcgaatgtaatggattgcaatgtaattgattctaatggaatggaatcgaaaataatgtaaacaaatggaatggaatgtaatgcaatttaatggaatagaaagtaatgcaatggattggaacggagtggaatagagtggaatggaattgaatggaatggaatcgaatggaatgaactggaatggaatggactagaatggaatggagtggaacaaattggaatcgaacggattggaatagaaaggaatggaaaggaatggaatggaatggaatggactcgaatagaatggagtcaaatggaatggaatcgaaaggaatggaaatgaatggaatggaattgaatggaatcgaaaagaatagaatggaatggagtttaaaggaaatatatcgaattgaatggaatggaatggactcggatggaatggactggaatggaatggacgcgaatggaatggactggagtggaatggactctaatgtaatggaaacgaatggaatggaatggaagggaaaagaatagaatggaacggaaccgaatggaatggaatggattcaaatggaatagaatcagttggaatggcattgaatggaatggaatggaatggaatgaaattaaatggactcgaatgaaatggcctggaatggaatagaatcgaatgctatggcatggaatggaatggaatggaatggacccaaatgtaatggactcaaatggaatggaatcaaatagagtggactcgaaaggaatggtttcgaatggaatttatttgaatagaatggaattgaatggaatgcaacattatggaatggaatcaaatggactggaatagaacggacccgaatgccatggatagcaatgtaattgattcgaatggaatggaattgaatggaatataatcaaacggaatggaaaggaatgcaatggaatggaaaagaatggaatgcaatggaaaggaacagagtgaaatcgagtggaatggaatcaaatgcaatggaatcgaatggattggaatcgattggaatggactggaatggaatggactcgaatggaatggacaggaacaaaatggaatcgaacggattggaaccgaatgaaatggaatggaatgtaatggaatggcatcaaatggaatggagtcgaatggaagggaatcgaatggaatggaatcgaatggaaacaaaaggaatagaatttaatggagtgtaatcagtgatatcgaatggaatggaatggaatggaatggaccagaatggaatggaacggaatggactctaatggaatagactggagtggaatggactcgaatggaatggaaacgaatggaatggaatggaatggaaaagaatagaatgcaatggaatcggatgtaactaaatggaatgcaatggagtcgaatggagaggagttgaatggaataatatcgaatggattcgaatggaatggaatcgaaaggaaagaactcgattggaacagaatagattggaatggcatcaaagggaatggaacagaaggtagtgtaatggcaagatatcgaatggaatggaatggaatggaattgactctaatggaatggactctaatggaatggactcggatggagtggactggagaggaatggactcgaatggaatagactgaaatggaaggggctagaatggtatggactggagtggaatgggctcgaatggaatggaaaggaatggaacggaatggattggaatggaaaggaaaagaatggaatggaatcagaaggaacggaatggcatggaatgcaatcgaaaggaatagaatcgaatggaatgcaattgaatgtaatggaatgtactggactcgaaaggaacggacttgtatggaatagaattgaatggaatggcatggaatggaatggaatggaatagaatggaatgcaataaaatggaacggagtggaatggagtggaatggaatggaatggaatggaatgcaattgaaaggaatagaaagaatggaaagtaatggaaatatattgaatctaatagaacggaatggaatggactcaaatggtatggactggaatggaatgaaattgaatggcatggactggagtggaatggtatggaatggaatgaaaaggaatggaatggaatgtattggaatggaaaggaaaagaaagaatggaaatgtagggaatggaatgaaatggaatggagtcaaatggaatagaatagaatggaatgcaatcaaatggaatggaatgcaatggactcgaatggaatggactcaaatggaatagaatagaatggaatggcatggaatggaatgaaatagaatggaatgcaataaaatggaatggagtggaaccgagtgaaatggaatcgaacggaatggaatggaatggaattgacccatatgaaatggagaccaatggaatggaatcgaatggaatggaactgaatagaatggaattgaatgcagtcgaaaggaatagaaagaatggagagtaaaggaaatatgtcgaatggaatagaatggaatggaatggacacgaatggaatatactggaatggaatggaatagaatggaacggactgaaaaggaatggacaagaatggaatggaaacaagaatggaatggaatggaatggaatggaatggaatggaagggaatggaaaggaatggaaaggaatagaatggaatggaatcagatggaatggaatagaatggaatagagttgaaaggaatagaatcgaatggaatggcatggaatgaaatggaatggaagggaacggaatggaatgggctcggatggaatggactggagtggaatggtctcgagtggaatggaaaagaatggaatggaatgcaatggaatgggaaggaatagaacacagcggaatcagatggaatggaatggaatggaatggagtcgaatggaatagaatcgaatggattgccatcaaatggaatggaatgcaattgactcgaatgaaatggactcgaatggaatagaatagaatggaattgcatggaatggaatggaatggaatagaatggaatgtaattaataaaatggaaaagagtggaatccagtgggatggaatggaatggaatggaatggactagaatgtacccgaattgagtggagccgaacagaatggaatcgaatggaatggaattgaatagaatggaattaaatgcatgtgaaaggaatagaaagaatggaagataatggaaagatatcgaatggaatagaatggaatggaatggactcaaatggaatggactttaatggaatggaatccaatggaatggactggagtggaatggactcgaatggaaagtaaacgaatggaagggaatggaatggaatggaatggaatggaaaggaaaggaatagaatggaatggaatcggatggaacggaatggaatggaatcgaatcgaatggaatggactcgaatggaatggactggaacaaaatggaatggaaaggattggaatagaaaggattggaagggaatggaatgaaatggaattgactcgaatggaatgcagtcgaatggaatagaatcgaatcaaatggagtcaaatggaatggaatcgaatggaaaggtatggaatggaatcgaaaggaatagaatggaatggagtgtaatggaaatatatcacatggcatggaatcgatggaatggattcgaatggaatggatgggaatggaatgtaatcaaatgggatggactggagttgaatggacaggaatggaatggaaaagaatggaatggaatggaatgaactcgattggattctactggaaaaaagtggaaacgaatggattgaaatggaatagaacagaatggaatggaatggaatggaatcaaatggaatggagtcgaatggaatgtaatcaatggaatgaaaaagaacggaatgaaaatgaatggaattgaaaggattagaatggaatgcagggtaatggaaagatgtcaaaaggaaaggattggaatggaatgcactcgaatgaaatggaatggaatggaatggaacagaatggaatggaattggatggaacggaatggaactgaatggcgtcgaatggaattgaatccaatggaatggcattgaatggaatggaaaggaatggaatggaattgaaaggaatagaaaggaatggaaacggatggaatggaatggaatggagtcgaatggaatagaatcgaatggaatgttgtcgaatggaatggaatggactcgaatggaatggaaacgaattgaatggaattgaatggaatggaatggaatggaaaggattagaatggaatggaattggatggaacggaatggaatggaatggagtcgattggaatagaatcaaatggaatggcattgaatggaatgcaatggaatggaatggattggaatggattggaatggaatggaattgaatggaatggactcgaatgaaaaagaatagaatggaatggcatcgaatggaaggggatgaaatggaatggaatggacgcaaatgtaagggattcaaatggaatggactcaaatagaatggactcgaaaggaaaggacccgaatggaatttattcaaatagagtgcaatcgaatggaatgcaatagtatggaatggaatagaatggaatggaccggaatggaatggaaaggaatagaaaggaatccagtgtattggattgcaatgtatttgattcgaatggaatggaatgtaatcatatggaattgaatggaatgcaatggaatggaatagaatgggatgtaatgtaatggaccggagtgaaatcgagtggaatggaatcaaatggaatggaatcaaatggaatggaattgattggcatggaccggaatggaatggcctcgaatggaatagactggaagaaaatggaattgcacggattggaaccgaacaaaatagaatggaatgaaatggaatggccttgaatggaatgcaatcaaatggaatgtaatcgaatgcaattgaatggaatcaaacggaaaggaattgaacggaatcgaaaggaatagaatggagtggagtgtaacggaaagatattgaatgcagtggaatggaatggaatggactcgaatggaatggactgggatggaatggactcgaattgaatggactggagtggaatgggctagaatggaatggaaatgaaacgactggaacaggatggaatggaacggaatggaatcgaatggaaatgaatagaatggaaaggaatcagatagaatggaatggaagggagtgcaatggaaagatattgaatggaatggaatggaatggaattgactggaatggacgggaatggaatcgactagaatggaatggactggaacaaaatggaatcgaacgaattggaactgaaagaaatggaatggaatgaaatggaatggcctcgaatggaaaggagtcaaatggaatggaatcgcatggaatggaatggagtcgaatggaatcgaaaggaatagaatggaatggagagtaaaggaaagattttgaatgcaatggaatggaatggaacggaatcgaatggaatggactggaaagtaatggactcgaattgaatggactgcaatggaatgggctagatggaatggaaacgaatggaatggaatggaatgttatcggatgcaatggaatggaatggaatggagtcgattggaacacaatgaaatggaatagcatcgaatgaaatggaatggaatggaatggactcgcatgaaaaagaacagaatggaatggcattgaatggaatgggatggaatggaaagggttggaatggaatggacccaaatgtaatggactcaaatggaatggactcatacacaatggactcgaaaggaatggtctcaaatggaatttattcgaatcgaatggaatcgaatggaatgcaatagtatggaatggaatagaatggaatgcaatcgaatggaatggaatggaataaaatggtctggaatagaaaggacttgaatataatggatttcaatgtaattgatttgaatggaatttaattgaatggaatgtaaccacatggattggaatggaatgcaatggaatgcaatagaatgcaatgcaaaggaatggaatgtattggaatcgagttgaacagaatcgaatggaatggaatcgagtggcaaggaattgaatgcaatggactggaatggaagggactcgaatggaatgtatggaaaaaaacggaatcgaacagattggaatcgaatggaaaggaatggaatggactcaaaaggaatggactcaaaaggaatggagttgaatggaatgtaatcaatacaatgaaaacgaatggaatggaactgaatggaatcgaaagaaatagaatggaatggagggtaatggaaagatattgaatggaatggattggaatggaatggactcgaatggaatagactggaatggaatggactggaatggaatggactggaattgaatggacaggagtggaatgtgctagaatggaatggaaacgaatggaatggaatagaatggaatggaatggaatggaatcgaatggaaaggaattgaatggaaaggaatcggatggaaaggaacggaaaggagtgtaatggaaagatttcaaatggaaacgaatggtatggaatggactcaaatggaatgcacgggaatggaatggactcgaattgaatgtactggagtggaatggtattgaatggaatggaatacagtggaatggaaaaaaatagaatagaatggaatcggatggaacggaatggaacggaacggagtcaaatggaatagaatcaaatggaatgcaattgaatggaaaggaatgcaatggactcgaatgaaatggactccaatggaatagaatagaatggaatgtcatggaatgggatggaatagaattgaatgcaataacatgtaacggagcagaatcgagtggaatggaatggaatggtacggaatggaatggaatgtacccgaatggaatgaagtcgaatagaatggaatcgaatggaatggaattggatagaatggaattgaatgaaatcgaaagtaatagaaagaatggagggtaatggaaagatatcgaatggaatggaatggaatggaatggactcgaatgcaatggactggagtggaaaggacactaatggaatggaaacgaatggaaataaatgaaatggaaaggaagagaatggaagggaattggatggaatcggatggaatggaatggagtccaatggaatagaatcgaatggaaaggcatcgaatggaagggaatggaatcaaatggaatggactcaaatggaatagaatagaatggaatggaatttaatgaaaacgaaaggaatagaatggaatggagtgtaatggaaatacatcgaatggaatggaatggaatggaatgtacttgaatggaatttactggaatggaatggactcgaatggaattgactggagtggaaaggactcgaatggagtggaaacgaatggaaaggattagaagggacacgaatagaacggaatggaattggatggaatggaatggaaaggaatggagtcgaatggaatggacactaatggaatggattcgaatggaaaggactggtgtggaatggaattgaatgcaatggaagcaagtggaatggaatggaatggaaaggaatggaatggaatggaatggaaaggaatggaatggaaaggaatggactcgattggaatggagttgaatgaaatggcatcgaaattaatcaaatcaaatggaatggaactgaatgcaattgaaaggaatagcattgaatgaagagtaatggatagatatcgaatggaaaggaatggaatggaatagacagaaatggaatggaaaagaatggaatggaatggaatggaaaggaatagaatggaatgaaattggatggaacggaatggaatggaatggagtcaaatggaagggaatcgaatggaatggcaacgaatggaatggaatggaatgcaaaagactcaaatggaatggactccaatggaatagaatcgaatggagtggcattgaatagaatggaatggaaaggaatggaatggaatggaatggacacaaatgtaatggattcaaatggaatggactgaaaaagaacggactcaaaaggaatggtctcaactgtaatttattcaaatagaatggaattgaatggaatgcaagagtatggaatggaatcgaatggaatggactggaatggaatggactggaatagaacagactcgagtgtaatggattgcaaagtaattgattcgaaaggaatggaatcgaatggaatgtaatcaaatggaatggaatgaaatgcaatggaaaggaatagaatggaatgcaatggaatggaatggtatggaatcgagtggaatggattggaatggaatggaaacaaatggaatggagtgaattggaatggactcgaatggaatgcactggaagaaaatggaatggaaaggattggaatcgaaaggaaaggaatggaatggaacagaatggaatggaatggaatgcaatcgaacagaatgcagtcgaatgcaatggatccaactggaatggaatcgaatggaatggaattgaatggattcgaaaggaatagaatggaatggagtgtaaaggaaagatattgaaaggaatggaatggaatggaatggactcgaatggaatggacaggagtggaatggaggcgagtggaaaggactggagtggaatggacacgaatgaattagaaaggaatggaatggaatgaaatggcatgcaaaggaataaagtggaatgtaatcggatggaacggaatggaatcaaatgcagtagaatgcaatagaatccaatggaatggtttcaaatggaatggattgaaatggaatggaacggaatggattggattcaaatgcaatggactcgaatggaatagaaaagaatagaatggcatcgaatgcaatggaaaggaatggaatggaaaggaatggaatggaatgggatggaatggacccaaatgtaatgtactcaaatggaatcgactcaaatagaatggacttcaaaaggattggtctcgaatggaatttattcgtatagaatggaatcgaacggaatgcaatactatggaatggaatccaatggaatggaattgaatggaatgtaatcaaacggaatgaaatggaagtcaatggaaaggaagacaatggaatgcaaaggaatggaaaggagtggaatcgagtggaatggaatcgaatggaatggaatcaaatgaaatgtaatcgattggaatggactggaatataatggactcgaatggattagacaggaaaaaaatggagttgaacagattggaatctaatggaacggaatggaatggaatggaatggactcgaaaggaatggagtcgaacggaatacaatcgagtggaatgaaatcgaatggaatggactggaatggaattgaaagaatagaatggaatgcagtgtaatggaaagaaatcgaatggaatggaatggactcgaatggaatgtactggaattgagtggactcaaatggagtggactggagtggaatggactcgaatggaatggactggaacaaaatggaatagaacggattggaatcgaatcgaaaggaatggaaagaaattgaatggaatggaatggaatggactcaaatggaatggagtcaaatggaatggaaccaaatggaatggaatggaatggaatagaattcaatggagtgtaacggatagatatggaatagaatggaatttaatagaatggactcgaatggaatggactggaatggaatgcaatcgaatggaagggactggagtggaatggactggaatgcaatggaaacgcttggaatggaactgaatggaatggaaaggaatagaatggaatggaattggatggaacggaacggaatggaatggagtcgaatggaatagaatcgaatggaatggcatgaaacggaaaggaatggaatggaatggactcgaatggaatggacttgaatggaatagaatagaatgaaatggcatagaatggaaaggaatagaatggaatggaatggacccaaatgtaatggactcgaattgaatggactcaaatagaatggattcgaaaggaatggtctcgaatggaatttattcgaatagaagggaatcgaatggaatgcgatactatgaaatggaatttactggaatggaatcagttgtaatggaacggaacggagtggagtgaaatagaacggactcgaatgttatggattgcaatgtaattgtttcgaatcgaatggaaacgaatgcaatgtaatcaaatggaatggaatggaatgcaatggaatgaaagagaattaaatgcaatggaatgtaacggagtggaatcgagtgcaattgaatcggatggaatggaatcgaatagaatccaatggaatttactggaatggagtggactcaaatgaaatggactggaacaaaatggaatagaacggtttggaatagaacggattggaatcgaacggaatggaatggaaaggaatggaatggaatggaatcgattggaatggaatcaaatggaattgaatggaattgaatggaatcgaaatgaatagaatagaatggagtgtaacggaaagatatcaaatggaaagaaatggaatggaatggactcgaatggaatggaatgtaatggaatggactcgaatggagtggcctggattggaatggacttgaatgcaatggaaacgaatggaatggaatggaatggaatggaatggaatggattggaatggaaaggaatagaatggaatgaaatcggagagaacggaatgtaatggaatggattcgaatggaatagaatcgaatggaaaggcatcaaatggaatggaatggaaggaatagactcgaatggaggggaatcgaatggaacagaatcgaatggaaagtcctcgaatggaatggaatataatggaatggaatggaatggacacaaatggaatggacacaaatataatggactcgtatggaatggactcaaatagaatggaattgaaaggaatgaactggaacaaaatgtaatcgaaaggataggaatcaaacagaatggaatggaacggaatggaatggaatggaaaggactcaaatggagtggagtcaaatggagtggactgtaatagaatggaatggaattgaattgaatcgaaaggaatagaaaggaatggagtgtaatggaaagatatcgaatggaatggaatggaatggaatggaaaggattcaaatggaatggactggagaggaatagacttgaatggaacggaaatgagtggaatggaatggaagggaaaaaaaggaatggaatagaaatgaaaagaaagaaatgcagtcggatggaatggattggtataaaatgaagtagaatggaatagaatcaaatggaatagaatcaaatggaatggcattgaaaggaatggaatggaatggacacaaatgcaatggactcgaaaggaatggattcaaatagaatggaatagaaagactggtcttgaaaggaattaattcgaatagaatggaatcgaaaagaatgcaatagtatggaaaggaattgaatggaatggaatcgattggaatggaattgaatggaatcgaatagcatagaatagaatggactgtaatagaaagacatcgatcggaatggaatggaatggaatggactcaagtggaatggactggaatgaaatggactcaaatggaatggactggaacaaaatggaatcgaacggattggaatcgaatggaacaacatggaatggaatggaatggaatggaatgtactcaaatggaacggagtcgaatggaatggaaccaaatgtattggaagtgaatggaattgaaaggaatagaatgtaatggagcataatggaaagatatcgaatggaatggaatggaatggactcgaatggaaaggactggaatggaatggactcgaatggaaaggaaacgaatggaatggaaaggaatgaaatgaaatgtaaagttatagagtggaatggagttggatggaatggagggaactgaatggagtcgaatggaaaacaatcgagtggaatggcatcaaacggaatggaatggattggaatggaatgggcacaaacgtaatggactcgaatggaatggaaataagtggaatggaatggaaaggactagaatgaaatggaatcagatggaacggaatggaatggaatggcgtcaaacggaagagagttgaacggaatggcgtataatggaatgttatggaatggaatggactcgaatggaatgtactggaatggaatagaatcgaatggaagagcatcgaatggaatggaatggattggataaaaatgtaatagaatcgaatggtatggagtcaaatagaatgacctcaaaggaaaggtctcgaatggaatatattcgaaaagaatggaatcgaatggaatgtagtagtatggaatggaatcaaatggaatggtgtccaatggaacggaccagaatggaatggactgtaatagaaaggaccagaatgtaatggattgcaaagtaaatgatttgaatggaatggaatcgaatggtaagtaatcaaatgtaatggaatggaatgcaatgtaatggaatagaaaggaaagcaatggaagggaatggagtggaatcgaatggaatgtaatcgaatgaaatggaaacgaaatgaatgaaataaaatggaatggagtgtaatggaatggcctagaatgtaatggactggaacaaaatggaatcgaacagattggaatggaatggaatggaaaggaatagaagagaatggacttgaatggaatggtgtcgcagggaatggaaccgaacggaatggaattgaatggaatcgaaagtaatagaatggaatggagtgtaatggaaatataacaaatggaatggcatggaatggaatggaatcgaattgaatggaaacgaatggaatggaatggaaaggaatagaatggcatggaataggatggaaaggaatggaatggaatggagtcaaatggaatggaatcgaatggaacggaatggaatggaatggagtcgaatggaaaggaatcgaatggaatggcatcgaatggaatgcgatggaatggaatggactggaatggaatagaaccaaatggaatggcatcgaatggaatggagtggaatggaatggagtggaatggaatggacccaaatgtaatggactcgaatagaatggagtcaaatagaatggacttgaaaggaatggtctcgtatggaatttatttgaataggatggaatcgaatggaatgcaatagtgtggattgttatcaaatggaatggaatcgaatggaatggactgcaatggaatggactggaatagaacagacttgacagtaatggattgaaatgtaattgaatcgaatggaatgcagtcaaatggaatgtaatcaagtggaatggaatggaatgcaaggaaatggaacagaatggaatgcaatggaatggaatgaagttgaatcgagtggaatggaatcgagtggaatggaatcgaatggaatggaatagaatggaatggactggaatggcaaggactcgaattgaatgtactggaactaaatggattcgaacggattggaatggaatggaacggaacggaatggaatggaatagaatggactcgaatggaaaggagtcgaaaggaatggaaccaaatggtgtggaattgaatggaatcgaaaggaatagaatggaatgtagtgtaatggaaagatatcgaatgaaactctatggaatggaatggactcgaatagaatagactggaatggagtggaatcaaatggaatggcctggagtggaatggactcgaatggaatggaaacgaatgtaatgtagtgtaatgtaatggaatggaatggaaaggaatagacaggaaaggaattggatggaatggaatggaaagaaatgagttgattggaatagaatcgtattgaatggcatggaatggaatggaatggaatgaaacgtactcgaatggaatggactcaaatggtattgaatggagtggaatggcaccgaatggaaaggaatggaatgaaatggaatgtaatggaatggaccaaaatgaaatggactggaatggaatggactccaatagaatggactcgaaaggaatggtcttcaatggaatttattcgaatagaatggaatagaatggaatgcaatagtatggaatggaatagaatggaatggatcacaatggaatggactggaatagaatggacctgaatgtaatggatggcaatgtatttgatttgaatggaatggaatcgaatggaatgtaatcaaatggaatggaatggaattcaacggaatggaatagaatgcaatgcaatggtatgaaacggagatgtattgagtggaatggaatcgaacggaatggaatcgaatggaatggaatagaagagaatggaatgcactcgaatggaatggactggaacaaaatggaattgaacggatgggaatcaaacagaagggaatggaatagaatggagtggaaagaaatggaatcgaatggaatggagtcgaaaggaatcgagtcgaaaagaaaggaatcgaataaaatgaaatcaaacggaatggagtcgagtggaatgcaatccaacagaatggaattgaattgaattgaaaggaatagaatggaatggagtgtcatggaaaaatatcaaatggaatggaatggaatggactcgaatggaatggactcgaaagtaatggacacgaatggaatggactgcattggaatggattcgaatggaatggaaatgaatggaatggaatggaacgagtagaatggaacggaatcgcatggaacggaaaggaatgcaatggagtcgaatggaaaagcatcgaatggaatggccacgaaagaatggaatggaatggaatggaatggaatggactcgaatggaatggactcgaaaggaatagagtcgaacggaatggcatcgaatggaatggaaaggaatggaaaggaatggaatggaatggacccaaatgtaatggactcgagtggaatggactcaaatagaatggattagaaaggaatggtctcgaatggaatttactcgaatagaatggaatcgaatggaatgcaatagtatggaatggaatcaaatggaatggaatcaaatggaatcgactggaatggaatggactggaatagaagcaaatcgaatgcaatggaatgcaatgtaattgtttcgaatggaatggtattgaatggaatgtaatcaaatggaatggaatggaatgcaatggaatggaatagaatggaatgcattggcatggaacagagtggaattgagtgtaatggaattgaatggaatggaatcgaattaaatggaatcgaatggaatggacaggaatggaatggactaccatggactggactgaaacaaaatggaatggaacagattggaatggaacagaacagaatggaatggaatggcatggaatggaatggactccagtggaatggagtagaatggaatgcaatcaaatggaatggaatcaaacagaatggacagaaattgaatggactcgaatggattggacaggaacaaaatggattcaaatggattgtaaacgaaaggaacagaatgaaatagcatggcatggaatggaatggtatcgaatggaatggtatccaatggaacggattgaaacgaaatggaatcgaatggaatggaatagaatagaagggaattgaatggaatcaaaaggaataggatggaatggagggtaatgagagatatcgaatataatgtaatataatgtaacgtaatggaatggaatggactggagtggaatggacttgaaaggaatggagacgaatggaatggaatagaaaggaaatgaatagaatggaatgcaattagatggaatgaaatggaagggcacgaagtagaatggaatagaatcgaatggaatggcatcaaatggaatggaatggactcgagtggaatggacaagaatggaatagcatcgaatggaatggcattgaatataatggaatggactggaatggaatggaatcgaatgtaatggattgcaatgtaattcattcgaatggaatggaatcgaatggaatgtaatccaatggaatggaatcaaatggaatttaatccaatggaatggaatggaatgcaatggaatggaaaagaatggaatgcaatggaatggaacggagtggaaacgagtggaatggaatcgaatggaatggaatggcatggattcaaatggaatggactggaatggaatggactcgaatggaatggactgcaacacaatggaatggaaccgattggaactgaagggatttgaatagaatggattcgaattgaatggactccaatggaatggagtctaattgaatggaaccaaatggaatggaatcgaatggaatggaatttaatagaatcaaaaggaattgaatggaatgaagttttatggaaacatcgaatggaatgcaatggactcgaatgaaatggcctagaaaggaatggactcgaatggaatggacgggagtggaatggactcgaatagagtgtaaaccattgtaatgggaaggaatttaatggaatggaatggaaaagaatagaattgaatggaatcagatggaacggaatggaatggaatggagtcaaaagaatagaatcttatggaatggcattgaatggaatggaatgggatagactcgaatggaatggactcaaatggaatagattcgaatggaatggcaatgaatggaagggaatggaatgggtaaaaactaatggactcgaatggaatggaataaaatagattcgactcgaaaataatgatctcgaatggaatttattcgaatagaacggaatcgaatggaagggaatctaatgaaatggagaggaatggaatggagtggaatagaacggacttgaatgtaatggattgaaatgtaattgattcgaatggaatggaatcgaatggaatgtaatcaaattgagtttattggaatgcaatggaattgactagaatggaatgcaatggaatggaacggagtggaattgagtggaatggaaaccaatggaatggaatcgaatggaattgaatggaatggaatggactccaatgtaatggactgaaacaaaatggaatcgaaccgattggaatcgaatggaacagaaaggaatggaatggaatggactttaatggaattgagtcgaaaggaatggaatcgaaaggaatggaatcaaatggagtggaatttaatggattcgaaaggaatagaatggaatggagtgtaatcgaaatatcgaatggaatggaatggaatggactccaatggaatggactggaatggaatggactccaatggaatagactgcagtggaatggaatccaatggaacagaaaagaatggaatggaatggaaaggagaactatggaatggattcgtttggaacggaatggaatggatacgaatggaatagaatcaaatagaatggcatcaaaaggaatggaatggaatgcaatggactcgaacggagaggcctagaatggaatggactcgagtggaatggcatcgaatggaatggaatggaatgaaatggaatggaatggaccccaaagtaatggactcgaatggaatggactcaaatagaatggactcgaaagcaatggtctccaatggaatttattcgaatagaatgtaatcaactggaatgcaatagtatggaatgaaatcgaatggaatggaatcaaatgcaatggactggaatggagaggactggaataaaacggactggaaagtaatggattgcaatgcaattgattcgaatggaatggaattgaatgaaatgtaatcaaatggaatggaatggaatgcaatagaatggaatagagtggaatgaaatggagaggaatcgagtggaatagaatcgaatggaatggaatagaatggaatggactggaatggaattcattcgaatggagtggactggagtggaatggaattgaacggaatggaaacgaatggaatggaatggaatggaaaggaatagaatggaatggtattggatggaatggaatggaatggaatggagtcgaatggaatggaatggaatggagtcgaatggaatagaatcgaatggaatggcatcgaatggaaaggaatggaatagaatcgaatagaatggactcaaatggaataaaatagaatggaatggcatttaatggtatggaatggattggaatggaatggaatggaatggaaccaaatgtaatggactcgaatggaatgtactcaaatagaatgtactcgaaagggatggtctcaaaaggaatttattcgaatagaatggaattgaatggaatgcaataacatggaatggaatcgaatggaatggaatcgaatggaatggaccaaaatggaatgtactggaattgaacagactctaatttaatagattgcgatgtaattgatttgaacgcaatggtattgaattgaatgtaatcaaatggaatgttatgaaatgcaatggaatggaatagaatggaatgcaatggaatggaagagaatggaatgcaatggaatggaacagagtggaatcaagaggaatggaatcgaatggaatggactggaatggaatgtactcgaatggataggactggaacaaaatgcattcgaacggattggaatggaatggaatggaatggaatagaagggaatagaatggaatggattcgaatggaatggaaccgaactaaattgaattgagtggaaacgaattcaatggaatcgaaaggattaaaatgaaatcgagtgtaatggaaatatatcgaatggaatggaaagaaaaggagtggactcgaatgaaatacaaggaatggagtggaatcgaatggaatggactggagtggaatggacgccaatggaatgtaaataaatggtatggaatggaatggaatgtaatggaaaggagaagaatggaatggaatcggatggaaagaaatggtatggaatggagtcgaaagaaatagaagcgaatggaatggcatcgattggaatggaatggaatggaatggactcgaatggaatggacttgaaaggaatcgaatggaatgtaatggcatcgaatggattggaatggaatcgagtggaatggaatggaatggaacggaatggaaccaaatgtaatggacttgaatggaagggactcaaatagaatcaattggaaatgaatggtctacaatggaattttttcgaatagaatggaatcgaaaggaatgcaacagtatggaatggaatagaatggaaaggaatcaaatggaatggagcggaatagaatggattggaatagaacggactcgaatgtaatggattgcaatgaaattcattcgattgaatggaatccaatggaatgcaattcaatggaatagaatggaatgtaatgtaatggaatgaaagagaatggaatgccatggaaaggaatggagtggaatcgaggggaatggaatcgaatggaatggaatcgaatagaatggactcgaatggaagggaatcgaatggaatggactcgagagaaatggtatggaatggaatttattctaatagaatggaatcgaaggaaataaagtagtatggaatagaatcgaatggaatggacgggaatggaatagaatggaatagaacagacttgaatgtaattaatagcaaagtaattgattcgaatggaatgcaatagaaaggaatgtaatctaatggattggaatggaatgcaatggaatggaatagaatggaatgcaatggaacggatcagagtggaaatgagtgtaatggaattgaaaggaatggaatcgaatggaatggaatcaaatggaatggaaacgaatggaattgactggaatggaatggaatggaatggacacgaatggaatggattcaaatgtaattgaaactaatttaatagaatggaatgaaatttaacagaaagggatagaatggactggaatcggatggaatggaatggagtcagatggaatagaatcgactggaatgtcattgaatggaatggaatggaatggaaaggaatggaatcaaatgtaatggaaaagaaattaatggaatggagtgtaatggaacggaaagggatagaatggaatggaatcggatggaatggaatggaatggaatggagtcagatggaatagaatcgaagggaatgtcatggaatggaatggaatggaatggaatggaatggaagggaatcgaatggaatggactcaaatggaacagaatcgaatggaatggcatcaaattgaatgaaatggaatggaatgaaatgaaatggaatttaatggaatggacccaaaggtaatggactcaaatggaatggactcgaaaggaatggactcgaatggaatttattcgaatagaatggaatcgaatggaatgcaattgtatggaatggaatcgaatggaatggcatccattggaatggaactgaatggaatggactcgaatggaatggtctctaatggaatagaatcgaatggaatggaaataaatggaatggaatggaatggaatggattagacccaaatgtaaaggaatcgaatggaatggactcaaatagaatggactcgaaaggaatggtctcaaatggaatttattcgaatacaatggaatcgaaagtaatgcagtagtaatgaaaggaattgaatggaatggaattgactggaatggaacggaatggaatggactggaatagaacggactcgaatgtaatgtattgaaatgtaggggatttggatgccttcaaattgaatggaatgtaatcacatggaatataatggaatgcaatgtaatggaatagaatagaatgcaatggaattgatccaagtggaatcaaatgtaatggaatcgaatggaatgcaatcgaatggaatgaactggaatggaatggactcgaacataatggcctggaacaaattggaattgaacgttttggaattgaacagaatggaatggaatggactcgaatggaatgaagtcgaatggaatgcaatcgaatggcaaggaatcaaatggaatggaatagaatggaatcacaaggaatagaatggaatggagtgtaatggaaagatattgaatggaatggtatggactcgataggaatggattagaatggaatggactcgaatagaattcactagagtggaatggactcaaatggaatcgaaacgaatggaatggaatggaacggaatggaaaggaatataatggaatagaatcggatggaatggaatggaatgcaatgaagttgaatggaatagaatccaatggaatggcctcaaatggaatggaatggaatggacccgaatggaatggactggagaggattggactcaaatggaatggaatggaatggagaggaatagaatggaatggaatcggatgtaacagaatggaatagaatggagtcgaaaggaataaaataaaatggaatggcatcgaatgcaatggaatggaatggaatggaatggactcgaatggaatttgttcaaatggaatagaagagaatggaatggcattaaatggattggaatggaatggaatggaatggaatggaaccagatgtaatgtactggaatggaatggactcaaatgaacggattcgaaaggaatggtctcgaggggaatttattcgaatagaatggaattgaatggaatacaatagtatggaatggaatcgaatgaaatgggaatgaatggaatgtaccggaatggaatggactggaatagagcagactcaaatgtaaaggattgcaatgtaatagatgcaaatggaatggaatcaaatgggatgtaatcaaatggaatggaatggaatgccatggaatggaatagaatggcatgcagtggaatggaataacatggagtggaatgaaatcgaatggaatgtaatcaaatggaatggaatggaatgccattgaatagaatagaatggaatgtaatggaatggaatagaatggaatgcaacggaatggaatggagtggagtcgtgtgcaatggaattaaatgtaatggaatcgaatggaatggattcgaatcgaatggactggaatggaaaggacttgaatggaatggactgcatcaaaatggtttcgagtggattggagtcgaacggaacagaatggaaaggagtggaatggattggaatgaaatggaatggactcgaattaatggagtcgaacggaatggaatcaaatggaatgtaatcgaatagaatggaactgaatggatttttttttttattatactctaagttttagggtacatgtgcatattgtgcaggttagttacatatgtatacatgtgccaagctggtgcgctgcacccacaaatgagtcatctagcattaggtatatctcccaatgctatccctcccccctcccccgaccccaccacagtccccagagtgtgatattccccttcctgtgtccgtgtgatctcattgttcaattcccacctatgagtgagaatatgcggtgtttggttttttgttcttgcgatagtttactgagaatgatggtttccaatttcatccatgtccctacaaaggttatgaactcatcattttttatggctgcatagtattccatggtgtatatgtgccacattttcttaatccaggaattgaaaggaatataatggaattgagtctaatggaaagatatagaatgttatggaatggaatggactcgaatggaatggcctggaacggaatggactcgaaaggaatggactggagtggaatggcctcgaatgtaatggtaacgaatggattggaatggaatggaatggaacggaaaggaatagaatagaatggaatcggatggaatggaatggagtcgaatggaagagaatcgaatggaatggcatcaaatggaatggaatggaatgcaatggaatgagatggaatagactcgaaatgaatggactcgaatggaatagaatcgaatggaatggcaacgaattcaatggaatgtaatggaatggaatggacccaaatgtaatggactcgaaagtaatatactcaaatagaatggacttgaaaggaatggtgttgaatggaatttattagaatagaaagtaatagaatggaatgcaatagtatgtaaagcaatcgaatggaatggattcgaatggaatggaatggactggaatagaatggacaagaacgtaatggacatcaatcatatggatttgaatggaatggaatcgaatggaatgtaatcaaatgaaagggaatggaatgcaatggaaaggaatggtgtggaatcaagtggaatggaatccaatggaatggaatcgaatggaatggaatcaattgaaaggtactggaatggaatggacaccaatggaatgaactggagcaaaatggaattgaacggattcgaataaaaccgcacggaatggaatggaatggaatggactcgaatggaatggagtcgattggaatggaatcgaagggaatggaattgaatggaatggacttcaatggaatcgaaaggaatagaatggaatggagtgtaatggaaaagtatcgaatacaatggaatggaaaggaatggactcgaaaggaatggacaggaatgtaatggaattgaatggaatggactggagtggaatggactcaaatggaatggaaatgaatgcaatggaatgtaatggaattaaatggaaaggaatagaatggaatggaattggatggaatggaatgaaacggaatggtgttgaatggaatagaatccaatggaatgacatcgaatgggatggtatggaatggactcgaatggaatggactcaaatcgaatcgaatagaatggaatggcatcgaatggaacagaatggagtgaagtgtaatggaaagatatcaaatggaatagaatggaatggaatgggctcgaatggaatggactggaatggaatggactcaaaaggaatggactggattggaatggactcgaatggaatggaaacgaaagaaatgtaatgtaatgtaatggaatggaaaggaatagaatggaatggaatcggatgaaatggaatggattggaatgtagtcgaatggaatagaattgaaaggaatggcttcgaacggaatggaatcgaatggactcgaatggaatggactcgaatggatagtatagaatggaatggcatcaaatgtaatggaatggagtggattggaacggaattgcatggaatggacccaaatgtaaagggctagaaaggaatggaatcaaatagaatggagtagataggaatggtctcgaatgcaatttattctaataaattgaatagaaaggaatgcagtagtatggaatggaatcgaatggaatggaatccaacgcaatggactggaatgaaatggacgagattagaatggacgtgaatgtaatggattgcaatgtaattgatttgaatggaatggaatcgaatggaatataaacaaatggaaaggaatggaatgcaatggaatggaacaaaatggaatgcaatggaatggaacggagtggaatccagtggaatggaattgaatgtaatggaatcgaattgaatggactggaatgaaatggaatccaatggaatggactggaataaaatggaatcgaatggattggaatcgagcggaacggaatggaagggaatggaaaggaatggactcgaatggattggagtccaattgaatggaacccaatggaatggaattgaatggaatcaaaaggaatagaatggaatggagtgtaatggaaagatatcaaatggaatggaatggactcaaatggaatggactggaattgaatggactcgaatggaattgactggtgaggaatggaaacgaatggaatggaaaggattagaatggaatggaatcggatggaacggaaaggaatgaaatggagaagaatggaatagaatcgaatggaatggcatcgaatggaatggaaaggaatgaatcgaatcgaatggaatgaactcgaatgaaatagaatccaatggaaaagagtagaatggaatggcatcgaatggcatcgaatggaatggaatggaaagaaatagaatggaatggacccaaatataatggactcgaatggaatggactccaatagaatggactcgaaatgaatggtctcgaatggaatttattcgaatagaatggaatcaaaagcaatgcagttttatggaatggaaacgaatggaatggaatccaatgccatggatcgcaatggaatggaatggaatagaatggatgcgaatgtaaaggattgcaatgtaattgatatgagtggaatggaatcgaatggaatgtaaagaaatggaatgcaattgaaggcaatggaatggattaaaatgaaatgcaacggaatgcaacggagtggaatcaagtggaatggaattgaatggaatggaattgaatgtaatggaatcgaatggaatggactggaatgaaatggactcgaatggaacggattggaacaaaatggaattgaacggattggaaacgatcagaacagaatgtaatggaaaggaatggaatggactcgaatggaatggagtcgaatcgaatggaacccaatggaatggaattgaatggaatcgaaaggaatagaaaggaatggagtgtaatggaaagatatcgaattgaatggaaaggaatggaacgaagtcgaatggaatggactggaattgaatggactcgaatggaattgactggtgtggaaaggaaacaaatggaatggaatggattggaatggaaaggattagaatggaatggaatcggatggaatggaatggaatgaaatggagaagaatggaaaaaaatcgaaaggaatggcttcgaaaggaatggaaaagaatggaatggactcgaatggaatggacacgaatggaatagaatagaatggaatggcattgaatggaatggaatggaatgaaatagaatggaatgcacccaaatgtaatggactcgaatagaatggactcaaatataatggactcgaacggaatggtctcgaatggaatttattcaaatagaatggaatcaaatggaatgcaattgtatggtatggaatcgaatggaatggaaatgaatggaaaggacagtaatggaatggactggaatagaacggactcgaattaaatggattacaatgtaattgattcgaatggaatggaatcaaatggaatgtaatcaaacggaatggaatggaatgcaacagaatggaatgcaatggaatggaatacaatggaatgcaatggaatggaacggaatggaatggagtgcaatggaatcaaatggaatggaatcgaatggagtggactggaatggaatggactcgaatggaatggactggaaaacaatggaatcaaacggattggaaaagaatggaatagaaaggaatggaaaggaacggattgcaatggaatggaatagactcgattggaatggcttcgaatggaatggaattgaaagaaatggaatcgaatagaatggaattgaatggaattgaaagggatagaatggaagggagtgtaatggagagaaatcgaatgtaatggaatggaatggacacgaatggaattgactggaatgtaatggactcgaatggaatggactggagtggaacggatttgaatgtaatggaaacgaatggaatgtaatgtaatgaaacggaaaggaatacaatggaatgtaatcagatggaacgacatggaatggaatggagtcaaatggaagagaatccaaaggaatggcatcaaatggaatggaatgtaatggaatgaaatggaatggactagaatggaaaggactagaaaggaatagaatcaaacggaattgcatccaatggaatggaatggaatggaatggaatggaatggacccaaatgtaatggagtcgaatggaacatactgaaatagaatggactcgaaaggaatggaatctaatggaatttattcgaatggaatggaatcgaatggaatgcaatagtatggaatggaatcgaatagaatggaatcaaatagaatggaatggaatggaatggactggaatagaatggactccattgtaatggattgcattgtaattgattcaaatggaacggaatcgaatggaatgtaatccaatggaatggaaaggaatgcaatggaatggaatagaatggaatgaaatggaattgaatggagttaattcaagtggaatgaaatcgaatggaatggactggaatggaatggagtggaatagaacggactcgaatatagcggattgcaatgtaattgattcgaatggaatggaatcgaatggaatgtaatcaaatggaatggaatggaatgcagtggaattgaatagaatggaatgcattggaatggaaatgaacggagtggaatcgagtggagtggaatcgaatggaatggaatcgaatggaatgaaatcgaatgcaatggactcaaaaaaatggacgagggagaaaaaggaatcgaacggattggaatcaaacggaatggaatggaatggaatggaatggaatggaaatgtctcgaatggaatggagtagaatgctagggaatggaatggaattgaatggaatggaaaggaatggagtgtaatggaaggatatcaaatggattagaatagaattgaatggactcgaatggaatgaattggaatcgaacggacacgaatgtaatggactggagtgaaatggagttgaatgtaattgactggattggaatggactcgaatggaatggacttgaatggaatgtactcgaatggagtggacaggaataaaatgtaatccaacagattggaatggaatggaatggaatggaatgcaattgaatggctcgaatggaatggagtcgaatggaatggaactgaaaaaatggaattgaatggaatcgaaaggaatagaatgaaatggagtgtaaaggaaagatatcgaaagaatggatggaaaaggactcgaatgaaatggactggaaagaaatgtactcgaatggaatggactggagaggaatggactcgaatggaagggaaaataatggaatggaatggaaaggaatggaatggaatgaaatcgtatggaactgaatgggatggaatggagtcaacaggaatagaatcgaatggaatagcatcgaatggaatggaatggactctaacggaatggaaacaaatggaatggaatggaatggaatagaaaggtatcaaatggactcgaattggatggaatggaatgcaatgaaatggaatcgaatggaatagaatcgaatgaaatggcatcgaacggaatggattggaatggaatggaaaggaatggaatggaatggactcgaatgaaaagtactcgaacggaatagaatagaattgaatggaactaaatataataaactcgaatgtaatggactcaaatagaatggaatcaaagggaatggtcttgaatggaatttattcgaatagaatggaatcgaacggaatgcaatagtatggaatggaatagaatggaatggaatcaaatggaatgaactggaatggaatggactgacatagaacggactcgagtataatggattgcaatgtattagattcgaatggaatggattcgaatggaatgtaatcaaatggaagggaacggaatgcctggaatggaataaaatgtaatgcaatggaatggaatagactggagtggaatggaatagaatggaatgtaatcaaatgtaatgtaatggaatgccatggaatggaatagagtggaattcaatggaatggtatagaatggaatgcaatggaattgagtggaatggagtcaaatggaatggaatggaatggcattaaatggaatggagtggaatggactcgagtggaaagggcacaaaaggaatatattataatggaacggcaaccaatggaatggaatggagtaaaatgcaaagatatcaaaaggaaaggaatggtatggactcaaatggaatatactggaatggaatggactcgaatggaatggactggagtggaatggacgtgaatggaatggaaaagaatggaatggaagggactggaatggaaaggaatagagtggaatggaatggaatggaaaggatctaaaggaatagaatcgaatggaatggcattgaatggaatggaatggaatggaatctgatggaacagaaaggaatggaatagaatcgaatggaatggcatcgaatggaatggaatggaaagaaatggaatcaaatggaatggcatcgaatggaatagaacagaatggaacgggatcgaacgaaatggaatgaaatggaatggaatggaatggaatggatgcaatagacccaaatgaaatggagtcgaattgaatggactcaaatagactgcactccaaaagaatggtctgaaatggaatttattcgaatagaatggaatcgaatagaatggaatctaatggaatggagcggaatggaatggactgaaatagaacagatgccaatgtaatggattgcaatgtaattgtttcaaatggaatggattcaaatggaacataatctaatggaatgcaatggaatgcaatggaatggaatagagtggaatggattggaacaaaaggaatcgaaatgattggaatcaaatgcaacggaatggaatggaatcgaatggacccaaatggaatggagtcgaatggaatggaatcgaatggaatggaatctaatggaatggatttgaatgggatcgaaaggaatggaatggaatggaatggaatataatggaaagatgtcaaatggaatggaatggaatggattgtaatggaaagatatcgaatggaaaggaatggactcgaatggaatggacaggaatggaagggactcgaatggaatggacacgaaagtaatggaaacgaatagaatggaatggaatggaaaggaatagaatggaatggaatcggatggaacgtaatggaatggaacagagtcgaatggaatagaatagaatggaatggcatcaaatggagtggaatggattggactggaatcgaatggaatggactcaattttaatacagtagaatggaatgacatcgaatggattggaatggaaatgaatgtaaggaactcgaaaggaatagaatcaaatgaaatgacatggaaaggaatggaagggaatggaatggaagggaatggaatggaatggatttaaatggaatggactcgaatgaagtagactcaaatagaatgaactcgaaagatatggtctcgaatggaatttattcgaatagaatggaatcgaatggaatgcaatagtttggaatggactcgaatggaatggaatagaatcgaatggggtgaaatggaaagatattgaacagcatggaatggaattgaatggactcaaattgaatggactataatggaatggactctaatggaatggactggagtggaatggactcaagtggaatggactctaatggaatggaaacgaatggaatggaatggaatggaatcggatggaatgcaatggaatggaaatgagtggaatggaatagaattgcgtgtaatggcgtcgaatggaatggaatggactcaaatggaatggactcgaattgaatagaataaaatggaatggtatacaatggaatggaatggacccaaatgtaatggactcaaatggaatggactcaaatggaatggacatgaagggaaaggtctctaatggaatacattcaaatagaatggaatcgaaaataatgcaatactatggaatagaatcgaatggaatggaccggaatggaatggactggaatacaacggactcaaatgtattggattgcaatctaattgactcaaatggaatggaatcgaatggaaagtattcaaatggaatttaatgtaatacaatggaatggaatagaatggaatgcaatggaatggaatagaatggaatgcaatggaatggaacggagtggaattgagtggaatggaagcaaacggagtggaatcgaatggaattgactgaaatggaatggactcgaatggaagggattggaacaaaatggagtcaaaaggattggaatcgaacggaaatgaatggaatggaatggaatgcaatggacccgaatggaatgcagtcaaatggaatggaatcgagtagaatggaattgaatggaattgaatggaaagaatggaatggagtgtaatggaaagataccaaatggaatggaatggaatggaatggacttgaatcaaattgactggaatggaatggactcgagtggaatggactggagtggaatggactcaaatggaatggaaacgaaaggaaaggaatgaaatggaaaggaatggagtggaatggaatggaatggaatggaatcggatggaatggaatggaatggaaaggagtcaaatggaatagaatccaatggaatggcatcgaatgcaatggcatcgaatggaatggaatcaagtgacatggactcgaatttaatggactcgaatggaatagaatcgaatggaatggcatggaatggaatggaatggaatggactgaaatgtagtggaacggaatggaaccatgtgaaaagaactcgaatggaatggacacaaatataatggactcagaatgaatggtctcgaattgtatttatacgaatagaatggaatcgaatggaatgtaatactatggaatgtaatactatggaatggaatcgaattgaatggacctgaatggaatggactggaatagaatggactcgaacgtaatagactgcaatgtaatagattagaatggaatggaaccgaatggaatgtaaacaaatggaattgaatggcatgcagtggaatggaatagaacagaatgcaatggaatggaatggagtggaatcgagtggaatggaatcgaatggaatggagtcgaatggaatggatttgaatggaatggagacgaatggagtggaatcgaatggaatgcaatctaatagaatagaattgaatgcaatcgaaaggaatacaatggaatggagtgtaatggaaagataacgaaaggaatagaatggaatggaacggactcaaatggaatggactcgaatggaatggactggagaggaatggactgaaatgaaatggaaacgaatggaatggaatggaattgaaatgaatagaatataatggaatcggatggaactgaatggaattgaatggagtcgaatggaatacactataatggaatggctttgaatggaatggaaaggaatggaatggaatggactcgaatggaattgactcgaatggaatagaacagaatggaatggtaaagaatgtaatggaatggaatggaattgacccaaatgtaatggactcgaatggaatggaatcaaatagaatgggttcaaaagaaatggtctcgaatggaatttattcaaatagaatggaatcgaatggaatgcaacagtatggaatggaattgaatggaataacgcacaatggaaaacactggaatagaaagcacttgaatgtaatggattgcaatgtatatgattcgaatggaatggaatcgaaaggaatgtaatcaaatggaatgtaatggaatgcaattgaatggaatagaaaggaatgcagtggaatggaacggattggaatagagtgcaatggaatcgaatgaaatggaatcaaatggaatggactggaatggaatggactcgaatggaatggactgaaaaaaatggaatcgaacggattggaatcgaatggaacggaatggaatggaattgaatggaatggactcaaaaggaatggagtcaaatggaatagattcgaatggaatgcaatccaatggaattgaattgaatgtaattgaaaggagtagaatggaatggacagtaatgtgaagatatagaatggaatgtaatggacacgaatggaatggattggaatgcaatggacgcgaatggaatggactggagtggaattgactcaaatggaatggaaacgaatggattggaatggagtggaatggaatggaagggactccaatgtaatggattgcaatataattgatttgaatggaatggaatcgaatggaatgtaatcaaatggaatagaatggtatgcaatggaatgaaatagaatggaatgcattggaatggaatggagtggcatggagtggaatggaatttaatggaacggaatcgaatagaatggactggaatggaagggactcgaatggattggactggaaaaaaatggaattaaatggattggaattgaacggaaaggaatggaatggaatggaatggactcgaatggaatggagacgaatggaatggaaacgaatggaatggaatagaatagaatggaattgaatggaatcaaaaggaatagaacggaatggagtgtaatggaaagaaatcgaatggaatgtaatagaatgtaatggagtttaatggaaagttatcgaatggaatggaatgaatccgaatggaatggactagaatggaatggattcgaaaagaatttactggaatggaatggaaacgaatggaatggaatggaacggaattgaatggaaaggaatagaatggaatggaatcagatggaatggaatggaatagaatggaatggaatggagtcgaatggattagaatcgaatggaatggcattgaatggaatggaatggaatggaaaggaatggactcaaatggaaaggactcgaattgaatagaatagaatggaatggcacctaatggaaaggaatgaaatggacccaaatgtaatggactcgaatggaatgggctcaaataaatggactcgaaaggaatattctcgaatgaatttatttgattagaatggactcgaatggaatgcaattgtatggaatggaattgaagggaatggaatcgaatggaatggaccaaactggaatggactggaatagaatggacccaaatgtaatggatttcaatgtaattgatatgaatggaatggaatttgttggattgtaatcaaatagaatggaatgcaaggcaaaggaatggaaacaaatggaaggcaatcgaatggaacggagtggaatcgagttgaatggaatcgaatgaaatggaatccaatggaatggaatcgaatgtaatgcactcgaatggaatagaatggaaaaaaatggaatcaaaaggattggaattgaacggaatggaatggaatgccatggaatggaatcgaatggaatggagtcgaatggaatagaattgaatggaatggctttgaatggaatggagcggaatggaatggactcaaaaagaatggattcgaatggaatagaatcgaatttaatggcatcgaatggaatggaaaggaatcgacccaaatgtaatggactcgaaacgaatggaatcaaatagaacgcactttaaaggaatggtctcgaatggaacttatttgaatagaaaggaatcgaatggaatgcaatagtatggaatggaatcgaatggaatggaattgaatggaatggaccagaatggaatggactggaatagaaaggactcgaacgtaatggattgcaatgtaattgatttgaatggaatggaatcgaatggaatgaaatcgaaaggaatggactggaatggaaatgaatggaatagtatggacaaaaatggaatggattgcaatgtaattgattcggatggaatggaatcaaatggaatgtaatactatggaatggaatggaatacaatggaatgcaaaggaatggaacggagtggaaatgagtggaatggaatcgaatggaatggaatccaatggaattgactgtaatggagtggaatcgaatggaatggacaggaataaaatggaatcgaatggattggcatcgaatggaactaaatggaatggaatggaagaatggaatggactcgaacagaatggagttgaatgaaatggtatcgaatggaaaggaatctaatggactggaaatgaatggaaacgaaaggaatagactgcaatggagtgtaatggaaagatatcgaatggaatagaatggaatggattcaaatggaatggtctggaatgcaatggactcgaatgggaaggactggtgtggaactgactcaaatggaatggaaaagaactgaatggaatggaatggaatggaaaggaatggaatggaaaggaagagtatataatggaatctgatggaaactaatggaagggaatggagtcgaatggaatggaatcgaatgtaatggcttcaaaaggaatggaatggaatggactcgaatggaatggaatggaatcgaatggcatcgtatggaatggaatggaattgaatggaagggaacggaatggacccaaatagaatggatttgaaattaatggactttactggaatggactcgaaagcaatgctcttgactggaattcattcaaatagaatggaatctaatgtaatgcagcagtattgaatggcatcaaatggaagtgaatcgaatggattggaccagaatggaatggactggaatagaagggactcaaatgcaatggatttcaatgtgattgattcaaacggaatggaatcgaatgaaacataatcaaatggaatggaatggaatgcaatggaatggaatagattggaatgcaatgaaatggaacagagtggaatcgagtggaatggaatagaatgggacggaatcaaatggaatggactggaatggaatggaatcgaaaggaatggactggaaaaaaatggaatggaatcgattggaatctaatgcaatggaaagtaatggaatggaatttaatggacttgaaaggaatgcagtcgaatggaatggaatcaaatggaatggaatagaaaggcatggaattgaattgaatcacaaggaatagaatggaatggagtgcaatggaaagacactgaatgtaatgtaatggaatggattcaaatagaatggaatggaatggaatggactcgaatggaaaatactggagtggaatggactcgaatggaaaggaaacgaatggaagggaaaggaatggagtggaaaggaatacaagggaatgaaatcggttggaacggaatggaatggaacggattcaaaggaagtagaattgaatggaatggcaatgaaagtaatggattctcacggaatgcactcgaatttaatagaattgaatggaatggcatcgaatggaatggaatggaatggaacggaatggactgaaatgtaatggacttgaaaggaaatgtctcaaataaaatgcactggaaaggaatcgtctctaatggaatttattcgaaaagaatggaatcaaatggaatgcaatagtatggaatggaattgaatggaaagaaatcgaatggaatggacctgaatggaattgactggaatagaaaggactcgaatgtaatggaatgcaatgtaattgattcgagtggaatggaatggaatcaaatggaatggaataaaatgcaatggaatggaatagaatggaatgcaaaggaatggaacggagtggaatcgagtggattggaattgaatggaatggaattgaatggaatggaatcaaatggtatggattggaatggaatggactcgaatggtttggaatggaaaataatggaatccaacggattggaatcaaacgcaacagaatagaatggaatggaatggaatggagtcaaatggaatggaatcgaatgaaatcgaattgaaaggaatagaaaggaatagaatggaatggagtgtaatggaaagatatcaaatggagtgaaatggaactgaatggactcgaatagaatggaccggaatggaatggacaagaatggaatggacttgagtggaatggactcaaatggaattgaatcgtatggaaaggaatggaatggaaaggaatagaatggattggaatcggatgaaatggaagggaatggaatggagttgaatggaatagaatcaaatggaatggcactgaatggaatggaatggaatggaatgtagtagaatggaatgcaatggaatggactcgaatggagtggacacaagtggaacagaatcgaatggaatggcatcgcatgtaatggaaaggagtagaatggaatggaatggaatggaatggaaacaaatgtaatagactcaaaaggaatggactcaaattgaatggtgtcgaaaggaatggtctcgaatggaatttattcgaaaagagtggaatcgaatggaatgcaatagtatggaatggaatcgaatggaatgcaaaagtatggaatggaattaaatggaatggaattgaatggaatggatttgaatggaatggactggaatggaatggactggaatagaatctacccgaatgtaacgaattgcaatgtaattgatacaaaaggaatgaaatcgaattgaatgtaatcaaatggaatggaatggaatgcaatggactggaatagaatggaatgcaatggaatggaacggagttgaatcaagtgaaatggaatcgaatggaattgagtggaatggaatggactcgaatggaatggagtggaacaaaatggaaaagaacggattggaatcaaacggaatgaatggaatttaatggacttgaatggaatggagtcgaatggaatggaaccgaatggaatggaattgaatggaatggaattgaatggattggaaaggaatagaattcaatggagagtattggaaagatatcgaatggaatggaattgaatggaatcgaaaggaatagaattcaatggagagtattggaaagatatcgaatggaatggaatggaatggaatggactcgaaaggaaaggactggaatggattggaaccaaatggaatggaatggaatggactcgaaaggaaaggactggaatggattggacatgaatggaatggacgggaatggaatggactcgaaaggaatggaaacgaattgaatggaatggaatggaaaggaatataattgaatggaattgaatggaatggaatcgaatggaatggattcgaatggaatagaatcgaatggaatggcatcgaatggaatggaatcaaatagaatggtctcgaatggaatggaatccaatggaatagaatagaatggaatggtttcgaatggaatggaatggaatggattggattggaatggattggaatggaatggattgaattggaatgcacccaaatgtattgggctcaatggaatagactcaatagaatggattcaaaaagaatggtatcgaattatatttattcgaatagaatggaatcaaacggaatgccactgtaaggagtggatttgaatggaatggaatcgaatggaatgcactgaaatggagtggattggaatagaatgaacaagaatgaaatggatttcaacgtaattgatttcaatggaatgaaattgaatggaatataatcaaatggaatggaattgaatgcaatggaatggaattaaatggaatgcaatggaatggaatggataggaatctagtggattggaattgaacagaatggaatcgaattgaatggaccggaatggaatggactggaatagaacagactcgaatgtaatggattgcaatataattgattcggatggaatggaatcaaatggaatgtaatcaaatcaaatggaacggaatgcagtggaatggaatagaatggaatgcaatggaatggaacagaacagagtggaattgacaggaatggaatcaaatggaatggaatcgaacggaatggaatcgaatggaaaggacaggaatggaatggactcgaatggattggattggaacaaaacggaattgaacggactggaatcgaacagaatggaatggaatggactcgaatggaatggagtcgaatggaatggaaccgaatggaatggaattgaatggaatagaaaggaatagaatggaatggaatggagtgtaatggaaatatatcaaatggaatggactggaatggaatggactcgaatggaatggactggaataaaatgcaatagaatggattggaatcgaacggaacacaatggaatggaatggaaaggaatgcaatgcaacggactcgaaaagaatgtaatgtaatggaatggaatggaatggaaagcaatggactcgaaaggaatggagtcgaatggaatggaatcgaatggaatgcaatcgaatagaatggaattggaccgaatcgaaagaaatagaatggaatggattgctatggaaagatattgaatggaatggtttggaattgaatggactcgaatggaatggactccaatggaatggactggagtggaatggacttgaatggaatggaaacgaatgcaatggaatggaatggaaacaatagaatggaatggaatcggatggaatgcaatggaatggaatggagtcgagtggaatagaatcgaatggaatggcatcgaatggaatgtaattcaatggaatggactcgaaaggaatggaaacgaattgaatggaatgaaatggaaagaatagaatggaatggaatcagatggaatggaatggaatggagtcgaatggaatagaatcgaatggaatggcatcaaaaggaatggaatggaatggaacgtacccaaatgtaatggattcgaaagtaatggactcaaacagaatggactcgaaaggaatggtctcgaatggaatttattcaaatagaatgaatttgaatggaaagaaattgtatgctatggaatcgaacggaaaggaatcgaaaggaatggactggaagggaatgcactggaatagaatggactcaaatataatggatagcaatgtaattgattcgaatggaatggaatcgaatggaatggaatcaaatggaatggaatggattgcaatggaatggaatagaatggaatgcaatggaatggaatgtagtggaatcgagtggaatataatcgaatggaatggaatcaaatggaatggaatcaaatgaaatggactggaatggaatgaacacgaatggaatggaatggaacaaaatggaattcaatgcatgggatacaaactgaatggaatggaatggaaaggaatggaatggaatggattcgaattgaatggattcgaatggaatggaatccaatggattggaattgaatagaatggaattgaatggaatcgaaataaataaaatggaatggagtgtaaaggaaagatatcgaatgtaatgggatggaaaggaatgtactcgaatggaatggactggaatggaatggactcgaatggcatggactggagaggaatggactcaaatggaatggaaacgaaaggaatggaatagaatgcaatagtatggaaaggaatagaatggaatggaataggatggaaaggaatagaatggaatggagttgaatggaatacaatcgattggaatggcatcaaatgtaatgaaatggaatggaatagacttgaatgcaatggaaacgaattcaatggaatggaatggaatggaaagaaatggaaaggaaaggaaagaatagaatagaatggaatggaatcggatggaattgaatggaatggtatagaattgactcgaatggaatggactcgaatataatagaatcaaatggaatggaatggaatgcaatggactggaaaagaatggaatcgaatgtaattgattgcaatgtaattgattctaatggaatggaatcgaatggattgtatccaaatggaatggaatggaatgcaatagaatggaacggagtggaatagagtggaatggaatcgaatggaatggactggaatgtaatggactggaatagaatggactcgaatataatggattgtaaactaatagattcggatggattggaatcgaaggaatgtaatcaaatgtactggaatggaatgcaatggaatggaatagaatggaatgcaatgaaattgaatagaatggaacgcaatggaatggaaaggagtggaatcgaatggaatggaattgagtggaatggaatcgattgtactggaatcgaatggaatggaaacgaatggaatcgactggaatgtaatggacttaaagggaatggactggaacaaaatggaatcgaacggattggaatcgaatggaatggaacggaatcaattggcatggaatggactcgaatggaatgtagttgaatggaatggatccgaatggatggaattgaattgaatcaaaaggaatagaatggaatggagtgtaaaggaaagataccgaatggaatggaatggtacggaatggactcgaatggaacggactggaatggaatggactccaatggaatggactcgagtggaatgcacacgaatggaatggaaacgaatggaatggaattgaaaggaatgcaatggaatggagaggaatagaatgaaatggaatctgagggaacagaatggaatagaatggagtcgaatggaatagaatcaaatggaactgcatcgaatggaatggaatgtactcgaatggaatggaaacaaatggaaaggaatggaaaggaattgaatggaatggaattggatggaagggaactgaatgtaatggagtcaaatggaatagaatcgaagggaatggcatcgaatggaatggaaaggaatggaatggaatggaatcgaatggaatgaagtcaaatggaatagaatagaatggaatggcattgaaagaaatggaatggattggagtggaatggacccaaatgtaatggactcccatggaatggactcaaatagaatgaactggaattgaatggtctctacaggaatttattagaatataatggaaacgaaaggaatgcaattgtatgaaaaggactcgaatggaatggaatcaaatgaaatggaacggaatggaatgaactggaatagattgaactcaaatgtaatggatttgaatggaatggaattgaatggaatggaatataatgcaatagaatggaattgaatggaacggaacggaatggaatggagtggaatagagtggaatggaatcgaatcgaatggaatcgaacggaatggaatcgaatgaaatggactggaatggattggactcgaatggaatggacttgaaaaaattggaatcgaacggattggaatagaacggaatggaatggactcaaatggaatggagttgaatggaatggaaccgaatggaaggaaatcaaatggagtggaattgaatagaatcgaaagtaattgattggaatggagtgtaatgaaacatatcgaatggaatggaatgaaatggaatggactcaaacgcaatggactgaaatggaatggtcttgaatgcaatggattagtgggtaatggacacgaatgtaatggaaatgaatggaatggattggaatggaatggaatgcaatggaatggaatggaatagaatggaatggaataggatggaatgtaatgcaatggaatggtgttcaatggaatagaatcaaatggattgccatcgaattgaatggattggaatagaatagaatgaaacgaatggactcgaatggaatggactcgaatgtaatagaatcaaatggaatggactcgaatggaatggactgcaatggaatggactcaaatggaatagagaagagaggaatggactcgaatggaatgaaaacgaatggaatggaaaggaataaaattgaaaggaatagaatggaatggaagcagatggactggaatggaatggactgcagtcgaatggaatagtatcgaatggaatgacatcaaatagaatggaatgaaatttaatgtaatggaatcgaatggaatagaatccaatgtaatggcttcgaatggaatggacccaaatgtaatggactctaatgaaatggagtcaaatgggatggactcaaaaggaatggactgaaatgaaattcattcggatagaattgaattgaatggaatgcaatagtatggaatgcaatcgaatggaatggaccggaaccgaatggactggaatagaatggactcgaatgtaatggattgcaatgtaatagattcgaatggattggaatcaaatggaatgtaatcaattgtaatggaatggaatgcaatcaaatggaatagaatggaatgcaatggaatggaacggagtggaattgagtggaatggaattgattggaatggaatcgaacagaatggaatcgaatggaatcgactggaatgtaatggactcgaatggaagggactggaacaaaatggaatcgaacggaatggaatcgagtggaacacaatggaatcgaatggaatggaatggactcaaatggaatgcagtcgaatggaaaggatctgaatggatgaaatttaatgaaatcaaaaggatagaatgcaatggattgtaatggaattatatcgaatagaatggagtaaaagggaatggactcgaatggaacggagtggaatgaaatggacgcgaatggaatggactggagcggaatggacatgaatggaatggaaaagaatggaatggaatagaaaggaatgcaatggaatggagcggaatagaataaaatggaatcggagggaatagaatggaatggaatggagacgaatggaatagaattgaatagaattgcattgactggaatggaatggaatggaatggacccgaatggaaaggaaacgaatgtaatgtaatggaatggaatggaaaggaattgaatggaatgtaattggatggaagggaactgaatggatggagtcaaatggaatagcatcgaatggaatggcatcgaatggattggaatgtaatggaatgaaatggaatcaaatggaatggaatcgaatggaacagaatagaaaggaatggcatcaaatggaatggaatggattggaatggaatggacccaaatgtaatggactctctggcatggactcaaatagaatggactcgaatggaatgctctccaatggaatttattcgaatggaatggaatcgaaaggaatacaagagtatggaatgtaattgaatggaatggaatcaaatagaatggaggggaatggaatggactggaatagatcggactcaaatgtaatgcattgcaatgtaattgatgtgaatggaatggattcgaatggaatgtaatcaaatggaatggaatagaatgcaatggaatggaatagaatggaatgcaacggaatggaacggagtggaatcgagtttaatggaatcgaatgcaatggaattgaatggaatggactggaacaaaatggaatcgaacggattggaattgaacggaatggaatggactcgaatggaatggatacgaatggaatggaacctaatggaatggaattgaatagaatcgaaaggaatagaatggaatggagtgaaatgaaacatatggaatggaatggaatggaaaggaatggaatttaaaggactcgaatggaaaggactggaatggaatggactcgaatggaatggactagtggggaatggacacgaatggaatggaaaagaatggaatggaatagaatggaatggaatggaaaggaatagaatggaatggaacaggaataaacgtaaagtaatggaatggtgttcaatggaatagaatcaaatggaatgccatcgaattgaatggattggaatagaatggaatggaaaggaatggatttgaatggaatggactcaaatggaatagaatcaaatggaaaggactcgaatggaatggagaggaatggaatggactcgaatggaatggaatggagtagaatggacacgaattgactggaaacgaatggaatggaacggaatggaatggaaaggaatagaatggaatggaagcagatggaatggaatgggatggaatgcactcgaaaggaatggaatcgaatggaatgacatccaaaagaatggaatggaatttaatgtaatggacacgaacggaatagaatctaatggaatggcatcgattggaatggaatggacccaaatgtaatggactctaatggaatggactcaaatagaattgactcaaaggaatggtgtcgaatggaaattattcgaatagaatggaattgagcggaatgcaatagtatggaatggaatagaatggaatggaccagaatggtatagactggaatagaacagactggaatgtaatggattgcaatgtaatagattcgaatagattggaatcaaatggaatgtaatcaaatgtaatataatggaatgcaattgaatagaatagaatggaatgcagtggaatggaatagagtagaatgcaaaggaatggaatggagtggaatcgaatggaattgaattgagtggaatggaattgattggaatggaatcgaatggaatggaaacgaatgtaatcgactggaatgtaatggattcgaatggaatggactggaacaaaatggaatcgaacggaatggaatcgaatggaacggaacagaatcgaattgaatggaactgacgcgaatggaatgcagttgaatggaatggatccgaatggatggaattgaatggaatcaaagggaatacaatgcaatagagtgtaatggaaagatatctaatggaatggaatggacttgaatggaatggactggaatggaatgcactcgaatggaatggagtggagtggaatggactcgaatggaatggaaactaatagaatggaatggaaaggaatgtaatggaatggagatgaacagaatgaaaaggaattggagggaacagaacgcaatggaatggagtcgaaaggaatagaatcgaatggaattgcatcgaatggaatggaatggaatggactcgaatggaatggaaacgaatggaaaggaatggaaaggaattgaatggaatgtagtcagaaggaaaggaactgaaaggaatggagtcaaatggaatagaatcgaaaggaatggcatcgaatggagtggaatggactcaaatggaatacaatagaatggaatggcattgaatggaatggaatggatttgaatggaattgaaccaaatataatggactcgtatggaatggactcaaatagaatggactggaatggaatggtctcgagtggaagttattcaaatagaacgaaaccaaaatgaattcaatagtacgacatggaatcgaaagtaatggaatggaatggaatggaccggaatggaagggactggaatagatcggactcaaatttaatggattgcaatgtaatagatttgaaaggaatggaatctaatggaatataatcaaatggaatggaatggaatgaaatggaaaataataaaatgaaatgcaatggaatggaaaggagtagaatcaacaggaatggaacagaatcgaatggagtggaatggaatggactcgaatggaatggactggaatggaatggacacaaatgtaatcgactggaacaaaattgattcgaacggactggaattgaatggaacggaatggaatggaatggaagagaatggactcgaatgaaatggagtagaaaggaatggaactaaatggagtggaataaaatggaatcgaaaggaatagaatggaatggattgtcatggaaagatagcaaatcgtatggaatggaatggactcgaatggaatggagtggaatggagtggacttgaatgaaatcgactgaagtggaatggacacgaatgaaatgaaaacgaaggtaaatggaatggaaaggaacagaattgaatagaatttgatggaacggaattgaatagaagggagtcgaatggaatagaatcgaatggaatggcatcgaagggaatggaatggaaagaatggaagggaatagaatggaatggagtcgatttgaatagaataggatggaatagcatcgaatggaattgaatggaatgaaatggaatgcaatggaatggacccaaatgtaatggacttgaatggaatggacttaaatagaattgacttgaaaggaatggtctcgaaaggaatttattgggatagaatggaattgaatggaatacaattgtatgcaatggaatcgaatgggatggaatcgaatggaatagacaagaatggaatcgacaggaatagaatgaactcgaatgtaatggattgaaaagtaattgattcaaaaggaatggaattgaatgtaatgtaatcaaatgtaatggaatggaaagcaatggaatggaatagaatggaatgcaatggaatgaaatggaggggaaaagagtggaatggaatggaattgaatggaatggaatagaatggaatggactcgaatggaatggacgggaaaaaatggaatcgaacagattcaattcaaacagaacggcatcgaatggaatggaatcgaattgaatggaatagaatggaatggagtggaatggaatggactcgaatggaatggactggaaaaaaatggaatcaaacagatttaattcgaacagaacagaatggaatggaatgcagtggaaaggaatggaatagacttgataggaatggagtcgaatggaatggaattgaaagatatggtattgattagaatcgaaaggaatagaatggaatggagtgtaatggaaagatatcgaatagaatggaatggaagggaatggattcgaatggaatggactggaatggaatcgactggaatggaatggaatcaaatggaacggaattgaatagaatcggtcggaatagaatgtaatggagtgtaatggaaagatattgattggaatggaatggaatggaatggaaagaaaggaatagaaggcaaaggaatcggatggaatggaatggagtcgaatggaatagattcgaatggaatggcatcaaaaggaatcgaatggaatggacttgaaaggaaagtattcgaatggaatacaatggaatagaatggctacgaatggaatggaatggacgcaaatataatggactcgaatgtaatcgactcaaatagaatggactcgaaaggaatggtctcgaatggaatttagtcgaatagaatggaatcgaacggaatgaaatattatggaatgaattgaatggaatggaacggattggaatggactgaaatagaacggactcaaatataatggattgtaatgtaattgattggaatggaatggaaatgaatgcaacgtaatcaaatggaatggaatggaatacgatggaatagaaaagaatggaatgtagtggaaaggaatggagtggaatccagtggaatggaatagaatggaatggaatagaatggaatggattggaatggaatggaatcaacgtgagtggaatggaatggaatggaatgggatggaatggaatggaatggaatcaacccgagtggaatggaatggaatggattggaatggaacggaatgcaatggaagggaatcaacccgagtggaatggaatggaacgcactggaatggaatggaatggaattcaatgggatagaatcaaaccgagtggaatggaatggaatgcaatgaaatcgaatggaatcaacccgaatgcaatggcatggaatggaatggaattgattggaatggaatcaaactgagtggaagggaatggaagggaatggaagggagtgggatggaatggaatgaagtggaatggaatggaatgaaatggaaaggaatggaatggaatggagtggaacggaatcaacccgagtggaatggaatataatggaatggaatggaatggaatatcaacacaattggaatggaatggaatggaacggaatggaatggaatggaatcaactcgagtggaatggaatggaagggaatggaatggattggaatggaacggaatggaatggaatggaatcaacccgagtggaatggaatggaatggaattcaatggaatggaatcaaaccgagtggaatggaatagaatggaatggaatgaaatggaatggaatggaatggaatggaatggaatcaacccgagtgaaatggaatggaatggaatggaatggaatgaaataaacctgaatggaatggaatgggatgaaatcaaccagagtggaatggaatggaatgggatggaatggaatggaatggaacggtatgcaacggaatggaatcaagccgagagtaatggaatgtaatggaatggagtgtaatggaatgatatcaacccgagtggtgtggaatggaatggaatggaatagaatggaatggaatgcaatcaaccagagtggaatgtaacggaatggaatggaatggagtggaatgcaattgaatggaatcaacccgagtggagtggactggaatggaatggaatggaatagaacggaattgaatgaaatggcatggaatggaaacaacccgagtggaatggaatggaatgaaatggaatggaatggaatgcaatgccaatcaaaggaatggaacggaatggaatggaatggaatcaatcccaatggaatagaatggaatggaatggaatggtatggaatgcaatgaattcaacccgaatggagtggagtggactggagtagactgggatggagtggaatggcatggaatggaatggaatggaaaggaattgaataaacccgaattgaatggaatggtattaacccaagtggaatggaatggaatggaatggaatggaatggaaaggaatggaatggaatgaaccgaatggaatggaaaggaatggaatggaaaggaatggaatcaacccgagtggaatggaatggaatggagtaaacccgagttgaatgtaacggaatgcaatggaatggaatgcaatcaacccgagtgaaatggaatggaatggaagggaatggaatggaatggaatggaatggaatcaacccgagtggaatggaatggaatggaatggaatggcatggaatggaaaggaatcaactgcagtggagaggagtggagtggaaaggaatggaatggaatggaatggaattgaataaacccaagtggaatggaatggaatggaataaactcaattgcaatggaatgcaatggaatggaatggaatggaatggaatcaacccgaggggaatggaatggaatggaatgggatggaaccaacctgagtggaaaggaatggaatggaatggaaaggaatggaaccaacttgagtggaatggattggaatggaatggaatggaatggaattgaatcaactggaatggaatggaatggaatcaacccgagtggaatggaatggaatagaatggaatggaggggaatgcaatggaatgcaatggaatggagtggaatggaatggaattgaatgcaatcaaccagagtggaatggaatggaatggaatggaataaaaacgagtgaacggaatggaatggaatggaatggaatcatctcaaacggaatggaatggaatggaatggaatggaatggaatggaatggaatcatctcaaacggaatggaatggaatggaatggaattcaacgaaatggaatcaaaccgaatggaatggaatggaatggaatcaactagaacggaatggaatataatggaatggaattcaacggaatggaatcaaaccgagtggaatggaatggaatttaatggaatgaaatggtatggaatggaatcaacacaagtggaatggaatggaaagaaatggtatggtaatggaatcaacaaaagtggaatggaatggaatgtaatgtaatggaatgcaatgcgatggaataaaccctagtggaatggaatggacggtatggagcggaatggaatggaattgaatggaatggaatcaactcgaatggaatgaaatggaatggaatggaatggaatcaacacgagtggaatggagtggaatagaatggaatgttatggaatggaatggaatcaacccgagtggaatggaatggaatggaatcaaaccgagtggaatggaatggaatggagtggaatggaatggaattcaatggaatagaaaggaatggaatgaaatcaatccaagtggaatggaatggaatggaatggaacggaacggtatggaatagaatggaattaacccgagtggagtggagtggagtggagtggaatggaatgaaatggaatggaatggaaaggaatggcattgaatcaactggaatggaatggcatggaatggaatggaatagaatggaattgaatcatctggaatggaatggaaggcaatggaatggaatggaatggaatggtatcattccgggtgaaatggaatggaatggaatggaatggaatggaatgaactggaatggaatggaatggaatagaatggaattgaatcaaccagagtggaatggaatggaataaacccgattggagtggagtggattggagtggagtgtaatggaatagaatggaatggaatggaatggaatcaaccgagtggaatggaatggtatggaatggaatggaatcaacccgattggagtggagtggattggagtggagtgtaatggaatagaatggaatggaatggaatggaatcaaccaagtggaatggaatggtatggaatggaatgaaatggaaggaaatgaactggaatagaatggaatggaatggaataaaaccgagtggagtggaatggaatgaaatggaatggaatgcaaaggaatgcagtagaatggaatggaatggaatcaacgcgagtggaatggaatggcaaggaatacaatggaaaggaatggaatggagttgagtggaatcaaccagagtggaatggaatggaatggaatggaatggaatggaatggaatagaatggaatggaatggaatagaatggaatggaatagaatggaatggaatggaatagaatggaattgaatcaactggaatggaatggaatggagtggaatggaatggaatggaatcaaaccgagagaaatggaatggaatggaatggaattgaatggaatgcaatggaatggaattgaatggaatggaattgaacgaagatgagaggaatggaatggaatggattggaatgccatagagtggaattgaataaacaagagtggaatggaatagaatggaacagaatggaattgaatcaactggaatggaatggaatggaatggaatggaaaggaatggaaattaatggaatgtaatcaacccaattggaatggaatggaatggattggaatggaatttaatggaatggaatcgaatggaatagaatggaattaaatcaacaggaatggagtagagtggaaaggaatggaatgacatggaattgagtaaacccgagtggaatggaatggaatggaatagaatagaatggtactgtattaacccgagaggaatggagtggaatggaatggaatggaattgaatggaatggaatcgaatagaaacaacctgagtggaatggaatggaatggaatagaatagaatggtactatattaacccgagaggaatggagtggaatggaatggaatggaattgaatggaatggaatcgaatagaaacaacctgagtggaatggaatggaatggaatggaatggaatcaacctgagtgtaatggaatggaatggaatggaatggaatggaatggaatggaatcaacctgagtgtaatggaatggaatggaatggaatggaatggaatggaatggaatggaatggaatcaacacgagaggaatggaatggaatggtatggaagggaatggaatggaaaggaatggaatggaatgtaatcaagccgagtggagtggagtggactggagaaaattggattggaatggaatggaatggaatggtatggaataaacccaagtggaatggaatggaatggaattcaatagaatggaatcaaagagagtggaatggaatggaatggaatggaatgaacacgagtgaaatggaatggaatggaattcaatggaatggaatcaaaccgagagaaacggaatggaatagaaaggaagggaatggaatcaaatggaggggaacggaatggaatgcaatggattggaatggaatggaatgcagtagaatgggatggaaccaaccccaatggaatggaatgaagcagaaaggaatggaaacaacacgagtggaatggaatggaatggaatggaatggaatggaatggaatggaataacccgagtggaatggaatggaatggaataaactcaattgcaatggaatgcaatggaatggaatggaatggaatggaatcaacccgaggggaatggaatggaatggaatgggatggaaccaacctgagtggaaaggaatggaatggaatggaaaggaatggaaccaacttgagtggaatggattggaatggaatggaatggaatggaattgaatcaactggaatggaatggaatggaatcaacccgagtggaatggaatggaatagaatggaatggaagggaatgcaatggaatgcaatggaatggagtggaatggaatggaattgaatgcaatcaaccagagtggaatggaatggaatggaatggaataaaaacgagtggaacggaatggaatggaatggaatggaatcatctcaaacggaatggaatggaatggaatggaatggaatggaatggaatggaatcatctcaaacggaatggaatggaatggaatggaattcaacgaaatggaatcaaaccgaatggaatggaatggaatggaatcaactagaacggaatggaatataatggaatggaattcaacggaatggaatcaaaccgagtggaatggaatggaatttaatggaatgaaatggtatggaatggaatcaacacaagtggaatggaatggaaagaaatggtatggtaatggaatcaacaaaagtggaatggaatggaatgtaatgtaatggaatgcaatgcgatggaataaaccctagtggaatggaatggacggtatggagcggaatggaatggaattgaatggaatggaatcaactcgaatggaatgaaatggaatggaatggaatggaatcaacacgagtggaatggagtggaatagaatggaatgttatggaatggaatggaatcaacccgagtggaatggaatggaatggaatcaaaccgagtggaatggaatggaatggagtggaatggaatggaattcaatggaatagaaaggaatggaatgaaatcaatccaagtggaatggaatggaatggaatggaacggaacggtatggaatagaatggaattaacccgagtggagtggagtggagtggagtggaatggaatgaaatggaatggaatggaaaggaatggcattgaatcaactggaatggaatggcatggaatggaatggaatagaatggaattgaatcatctggaatggaatggaaggcaatggaatggaatggaatggaatggtatcattccgggtgaaatggaatggaatggaatggaatggaatggaatggaatgaactggaatggaatggaatggaatagaatggaattgaatcaaccagagtggaatggaatggaataaacccgattggagtggagtggattggagtggagtgtaatggaatagaatggaatggaatggaatggaatcaaccgagtggaatggaatggtatggaatggaatggaatcaacccgattggagtggagtggattggagtggagtgtaatggaaaagaatggaatggaatggaatggaatcaaccaagtggaatggaatggtatggaatggaatgaaatggaaggaaatgaactggaatagaatggaatggaatggaataaaaccgagtggagtggaatggaatgaaatggaatggaatgcaaaggaatgcagtagaatggaatggaatggaatcaacgcgagtggaatggaatggcaaggaatacaatggaaaggaatggaatggagttgagtggaatcaaccagagtggaatggaatggaatggaatggaatggaatggaatggaatggaatggaatagaatggaatggaatagaatggaatggaatggaatagaatggaatggaataaacccgagtggaacggattgtagtggaatggaatggagtggtatcaagccgagtgaaatggaatggattggaatggaaaggaatagaatggaatggaatcaacggaagtggaatggaatggaatggaattgaatggaatcaaccccattgtagaggagtggagtggagtggaatggaaaggaatggaatggaatggaattcaatagcatggaatcaaaccgagtggaatggaatggaatggaatggaatggaagggaatggaattcaatggaatgaaatcaaactgcggaacggaatggaatggagaggaatggaataatctcgagtgcaatggaatgcaatggaatggaatggaatggaatcaacccgagtggaatggaatggaatggaatgggatggaatcaacccgagtggaatggaatggaatggaatggaatggaatggaatcaaaacgagtggaatggagtggaatcgaatggaatggaatgaaatggaatggaatggaatggaaaggaatcaacccaagtggaatggagtggaatggaaaggaatggaacggaatcaaatggaatcaactggaatggaatggaatggaatcaacccgagtggaatggaatagaatggaatggaatggaatggaatggaatggaatggaatggaagggaatggaatggaatgcaatgtaatggaatggaatggaagggaatggaatggaatgcaatggaatggaggggaatggaaatgaatggaatggcatggaatggaatggaatcaacacaagtggaatggaatggaatggaaaggaatgcaatcaaattgagtgaaatggaatggaatggaaaagaatgaaatcaatacaagtggaatggattggaatggaaaggaatggcatcagatggaatcaatccgagtggaatggaatggaatggaatggaatggaacggaacggaatggaattgaatggaatgcaaaggaatggaatggaatgcaatggaatggattcaactcgagtggaatggaatggaatggaatggaatggattgnnnnnnnnnnnnnnnnnnnntggaatggaatggaatcgaccagagtggagaggaatggaatggaatggaatgaaatggaatggaatagagtggaatggaatggaatggagtggaatggaatggaatgcaatgaaatggaatggaatggaatgcaatggaatggagtggaatggaatggaatggaatagaatggaatggaatcaacccgagtggaatggaatggaatggaatggaatggaatccattggaatggaatggaatggaatagcatggaatgcaatgtaacggaaaggaatggaatcaacccgagtggagtggaatggaatggaatggattggaatggagtggaatggaatggaatggaatgaaatggaatggaatggagtggaatggaatggaatggaatggattgaaatggaatggaatggaatgcaatggaatggagtggaatggaatggaatggaatggaatggaatcaacccgagtggaacggaatggaatggaatggaatccattggaatggaatggaatagcatggaatgcaatggaaaggaatgcaatggaatcaacccgagtggagtggaatggaatggaatggaatgaaatggaatggaatggaatgcaatggaatggactggaatggaatggaatggaatggaatcaacccgagtggaatggtttggaatggaacggaatggaataaaacgagcagaatggaatggaatggaatggaatggaatggaatggaatcaactggaaaggaatggaatggaattcaacagaatgaaattaaaccgagtggaatgtaatgtaatgtaatgtaatgtaatgtaatgtaatgtaatgtaatgtaatgtaatcaactcgaaaggaatggaatggaattcaacggaatgtaatcaaaccgagtggaatggaatggaatggaatgaaatggtacggaatggaatcaagacaagtggaatggaatggaatgaaatggtatggaatggaatcaacacaagtggaatgaaatagaatggaatggaatcgaatgtaatggaatgcaatgggatggaataaaccccagtggaatggaatggaacagtatgtagcagaatggaatggaattgaatggaatggaatcaactcgaatggaatgaaatggaatggaatggaatggaatggaatggaatcaacacgagtggaatgcagtggaatagaatggaatggaatggaatcaacccgagtggaatggaatggaatggaatcaacccgagtggagtggagtggagtggagtggaatggaatgcaatggaatggaatggaaaggaatggcattgaatcaactggaatggaatggcatgcaatggaatggaatggaatagaatggaattgaatcatctggaatggaattgaaggcaatggaatggaatgggatgaaatggtatcaatccgagtgaaatggaatggaatggaatggaatggaatggaatgaactggaatggaatggaatggaatggaaaagagaggaattgaatcaactagagtggaatggaatggaatggaatggaatggaatggaatcaacccgattagagtggagtggattggagtggagtgtaatggaatggaatggaatggaacggaatggaatggaatcaacccgagtggaatggagtggaatggaatggaatgaaatggaaggaaatgaactggaatagaatggaatggaatggaatcaaaccgagtgtagtggaatggaatgtaatggaatgcaaagaaatgcagtggaatggaatggaatggaatcaacgcgagtggaatggaatggcaaggaatgcaatagaaaggaatggaatggaattgaatggaatcaaccagagtggaatggaatacaatggaatggagtagaatggaatggaatggaatagaatggaattgaatcaactggaatggaatggaatggaatggaatcaaaccaagagaaaaggaatggaatggaattgaatggaatgcgatggaatggaattgaatggaatggaattgaatgaagatgagaggaatagaatggaatggaatggcacagagtggaattgaataaacaagagtggaatggaatggaatggaatagaatggagtagaatggaattgaatgaactggaatggaatggaatggagtggaaaggaatggaaattaatggaatgaaatcaacccaattgtaatggaatggaatggattggaatggaatttaatggaatggaatcgaatggaatcgaatggaattaaatcaacaggaatggagtggagtgaaatagaatggaatggaatgcaattgaataaacccgagtggaatggaatggaatggaaaagaatagaatggtactgtaacaacccaagaggaatggagtggaatagaatggaatggaattgaatggaatggaacggaatagaaacaacctgagtggaatgaaatggaatggaatggaatggaatcaacctgagtggaatggaatggaatggaatggaatcaaatggaatggaatggaatcaacctgagaggaatggaatggaatcatatggaaaggaatggaatggaaaggaatggaatggaatgtaatcaacccgagtggagtggagtgcagtggagtggagaaaagtggattggaaaggaatggaacggaatggtatggaataaacccaagtggaatggattggaatggaatggaattcaatggaatggaatcaaaccgagtggaatggaatggaatagaatggaagggaatggaatcaaacggaggggaatggaatggattgaaatggattggaatggaaggtaatggaatggaatggatgggaatgggatggaaccaaccctaatggaatggaatggaatggaatggaagggaaaggaatggaatcaacacgagtagaatgaaatggaatggaatggaatggaatggaatcaacccgagtggaatggaaaggaatggaatgcaatggactataatgtaatcaactggaatggaatggaatggaatgcaatggaatggaatggattggaatggaatcaacctgagtggagtggaatggaatggaatggaatggaatggaattaacgcgagtggaatggaatggaatggaatgcagtggaatggaatggaacggaagaaacctgagtgaaatggaatggaatggattggaatggaagggaatggaatggaatggaataaacccgaatggaatggaatggaatggaatggaatgcaatagaatcaacccgagtggagtggaatggaatggaaaggaatggaatggaatggaatggaatagaatcaacccgagtggaatggaatggcatggaatggaatggaacggaatggaatggaatggaacggtatcaacacatttggaacggaatggaatggaatggaatagaatggaatcaaccccagtggagtggaatggaatggaatggcacggaattgaatgctatggaatgcaagggaatcagcccgattttaatggaatggaatggaatgaaatggaatggaacggaatccacccgagtggaatggaatggaattgattggaatgggaaggaaccaaccctagtggaatggattggaatggaatggaacggaatggaatggaattaactcgagtggaatggaatttaagggaatggaatggaatagaatgcaaaggaatggaaaggatttgaatggaatcaacaggaatagagtggaatggaatggaatgcaatgtaacggaatggattggaatggcatggaatggtatggaatgcaatggaatggagtggaatggaatggaatggaatggaatggaatggaagggaatggagtcaacccgagtgatatggaatggaatggaatggagtggaatggaatggaatggaatggaatcaacgcgaatggaatggaatggaatggaattcaatagaatggaatttaatggaatggaattgaacggaatggaatcaaccggagtggaatggaatggaatggaatggaatcaaccgagtgaaatgaaatggaatggaatggaatcaacgcgagtggaatggaatggaatggaatggaatggaatggaatggaatcaacccgagtggaaaggaaaggaatggaacggaacggaaaggaacggaatggaatggaatggaatcaacccaagaggaatggaattgaatggaatggaatgcacccaacccgagtggagtggaactgaatggaatggaatggaaaggaatggaatggaatggaaaataatgcaatggaatggaatcaacccgagtggaatggaatggaaaggaatcgaatgggatctacccgagtggattggaacggaatggaatgcagaggaatggaatggaatcaacacgagcggaattgaaaggaatggaatggaattaaatggaagggaatggaatggaattgaatgaaattgaatggattggaatggaatggaatggattcaacacgagtgtaatggaatggaatggaatggaatgcaatgaaaccgagtggaatgtaatataatgtaatgtaatgtaatgtaatgtaatgtaatgtaatggaatggaatggaatggaatggaatggaatggaatggaatggaatggaattgaatcaatccgagagaatggattgaaacggaatggactggaatggaatggaatggaatggaatggaaaactcgagtggaatggaatggaatggagtggcatgtaaagtaatggaatggaacagaatggaatcacccggagtggaatggaatggaatggattggaatggaatggaatagaatggaattgaatcaatccgagtggaatgaaatgaaatggaatggaattgaatggagtggaacgcaatggaaaggaatcaactggaatggaatgtaatggaatggaatagaatggaatggaatggaatagaatggaattgaaacaactggaatgcaatggaatggaatggaatggaatggaatggattcaaaccgagagaaatggaatgtaatggaatggaattgaatggaatggaatggaattgaatggaatggaactgaatcaactggaatggaatggaatggaattgaatgaacccgagtggaatgtaatctaatgtaatgtaatgtaatgtaatgtaatgtaatgtaatgtaatgtaatggaatggaattgaatggaacagaatggaattgaatcaacgtgagtggaatggaatggattgcaatggaatggaatggactggaatggaatggaatggaatagaaagcattgaatcaactggaatggaatggaatggaatggaatttagtggaatagagtggaattgattcacctggaatggaatgtaaaggaatggaatggaatggaatttaatcaactggaaaggaatgaaatggaatagaatggaattgaatcacctggaatggattggaatggcatggaaaggaatggaatggaatggaatggaatggaatagaatcgaatttaattgattcaacccgagtggaatgtaatgtaatgtaatgtaatgtaatgtaatgtaatgtaatgtaatgtaataggatggaattgaatcatcccgagtggaatggaatggaatggaatggaaaggaatctacatgagaggaatggaaaggaattgaatggagtggagtggagtggaatggaatgtaaaggaaaggaattgaatggagtggaatgcaatggaatggaatggaatggaatcaacccgagtgcaaaccaatggaatggagtggaatggaatggaaaggaacagaatgggatgaaatggaatggaatctacccgagtgcagtggaatgtaatggaatggtgtggaatggaatggaatggaatcaaccagaatggaatggaatggaatggtatgtaatagaatggaatggaatggaattaaatcaaaccgtgtggaatggaatggaatggaatggaatagtatggaattgagtcaatccgtggggaatgcaatggaatggaatggaatggaatggaatggaatttaatcaacccgagtggaatggaatggaaaggattggagtggagtggaatggactagaatggaatggaatggaattcaatgaaatggaatggaataaccccgagtggaatgtaacgtaatgcaatggaatgaaatggaatgaaatggaatagcaaggaattgaatcaactcgtgtggaaaggaatgaaatggaatggaatggaatagaatggaattgaaccaacctgaaatgaatggaatggaatggaatggaatggaatggaatggaatggaatgggtgggaatgggatggaaccaacccaaatggaatggaatggaatggaatggaagggaaaggaatggaatcaacacgagtagaatgaaatggaatggaatggaatggaatcaacccgagtcgaatggaaaggaatggaatgcaatggactataatgtgatcaactggaatggaatggaatggaatgcaatggaatggaatggattggaatggaaccaacctgattggagtggaatggaatggaatggaatggaacggaatggaatggaatggaatggaatgcagtggaatggaatggaacggaaacaacccgtgtgaaatggaatggaatggaatggaatggaacggaatggaatggaatggaatggaataaacccgaatggaatggaatggaatgtaatggaatgcaatagaatcaacccgagtggagtggaatggaatggaaaggaatggaatggaatggaatggaatggaatcaacccgagtggaatggaatggcatggaatggaatggaacggaatggaatggaatggaacggtatcaacccaagtggaatggaatggaatggaatggaatagaatggaatcaaccctagtggagtggaatggaatggaatggaatggaagggaatggaatcaacccgactgnnnnnnnnnnnnnnnnnnnnnnnnnnnnnnnnnnnnnnnnnnnnnnnnnnnnnnnnnnnnnnnnnnnnnnnnnnnnnnnnnnnnnnnnnnnnnnnnnnnnnnatgtaatggaatggaatcaacgcgagtggaatggaatggaatggaattcaattgaatggaatttaatggaatgaaattgaacggaatggaatcaaccggagtggaatcgaatggaatggaatcaaccgagtgaaatgaaatggaatggaatggaatcaacctgagtggaatggaatggaaagaaatggaatggaatggaatggaatggaatggaatggaatcaacccgagtggaatggaatggaatggaacggaacagaaaggaacggaatggtatggaatggaatcaacccaagaggaatggaattgaatggaatggaatgcacccaatccgagtggagtgaaatggaatggaatggaatggaaaggaatggaatggaatggaaaataatgcaatggaatggaatcaacccgaatggaatggaatggaaaggaatggaacgggatcaacccgagtggattggaatggaatggaatgcagaggaatggaatggaatcaacatgagcagaattgaaaggaatggaatggaattaaatggaatggaatggagtgcaataggaatggaattgaatcatcccgagtggaatggaatggattggaatggaatggaatctacacgagaggaatggaatggaatggaatgaaatggaatggaatcaaccggagtgcagtagaatgaaatggaatggaatcaaccggaatgcagtggaatggaatggaatggaatgaaatggaatggaatcaaccggagtgcagtagaatgaaatggaatggaatcaaccggaatgcagtggaatggaatgtaatggtgtggaatggaatggaatgcaatggaatcaaccagaatggaatggaatggaatggtatagaataaaatggaatggaatggaattaaatcaacctgtgtggaatgcaatggaatggaatagaatggaattgagtcaatccgaggggaatgcaatggaatggaatggaatggaatggaatggaatggannnnnnnnnnnnnnnnnnnnnnnnnnnnnnnnnnnnnnnnnnnnnnnnnnnnnnnnnnnnnnnnnnnnnnnnnnnnnnnnnnnnnnnnnnnnnnnnnnnnnnnnnnnnnnnnnnnnnnnnnnnnnnnnnnnnnnnnnnnnnnnnnnnnnnnnnnnnnnnnnnnnnnnnnnnnnnnnnnnnnnnnnnnnnnnnnnnnnnnnnnnnnnnnnnnnnnnnnnnnnnnnnnnnnnnnnnnnnnnnnnnnnnnnnnnnnnnnnnnnnnnnnnnnnnnnnnnnnnnnnnnnnnnnnnnnnnnnnnnnnnnnnnnnnnnnnnnnnnnnnnnnnnnnnnnnnnnnnnnnnnnnnnnnnnnnnnnnnnnnnnnnnnnnnnnnnnnnnnnnnnnnnnnnnnnnnnnnnnnnnnnnnnnnnnnnnnnnnnnnnnnnnnnnnnnnnnnnnnnnnnnnnnnnnnnnnnnnnnnnnnnnnnnnnnnnnnnnnnnnnnnnnnnnnnnnnnnnnnnnnnnnnnnnnnnnnnnnnnnnnnnnnnnnnnnnnnnnnnnnnnnnnnnnnnngaattgaattgactcaactggaagggaatggaaaggaatagaatggaactcaatcaactggaatggaatggactggactggactggactggactggaatggaatggaatggaatagattggaaccgaatcaaccctaatggaatggattggaatggcatggaatggaatggaatggaatggaatggatttgaatcaacccgagtggaacggaatggaatggaagggaatggaatggaatgcaatagaatggaattgaatcaacacgagtggaatggaatggaatggaatggaatggaatcaacacgagtggaatggaatggattggagtggcgtggaatggaatggaatggaatggaatggagtggaagggaatggaatggaatggaatggaatggaatggaatggagtcgaatggaatggaatggaatggaaaagagtgaaacggaatggaatggaattaacccgagtggaaagggatggaatggagtggaatggaatggaagggaattcaatggaaaggaatggaaccaacctgagtggagtggaatggaatggaatggaatggaacagaatggaagggaatcaaccagaatggaatggaattaaatcaacccgtgtggaatggaatggaatggaataggatggaattgaatcaacctgagtgtaatataatgcaatgcaatggaatggaattgaatcaatccgagaggaatggaatggaatggattggcatggaatggattggaatggaatggaatggaatagaatggaatggaatggaatggaagggaatggaatttaatagaatggaattgaatgaactggaatggaacggaatggattggaatggaattgaatcaacaggaaaggaatggaaaggaatagaatggaattgcatcaactggaatggaacggaatggactggattggaatggaatagaatggaatagaatggaactgaatccacccgaatggaatggattggaaaggcatggaatggaatggaatggatttgaatcaacccgaatgcaacagaatggaatgaaatggaatggaacggaatggaatggaagggaatggaatggaatgcaatagaatggaattgaatcaacgctagtggaaaggaatggaatggaatggaatggaatgggatcaacatgagaggaatggaatggaatggaatggattggagtggagttgaatggaatggaatggcacggaattgaatggagaggaatggaatggaatgcaatagaatggaatggaatgaaatggaatttaaccaacccgagaggaatggaatggaatggagtggagtggagtggaatggactggaatggaatggaatgaaatggcatggaatgcaatggaatggattggaatcaacctgagtggaatggaatggaatggaatggaatagcgtggagttgaatcaactggaatggaatggaatggaattaaatcaaccctagtggaatggaagggaatggaatcgaatcatgtggaatggaatggattagaatggaattttaatcaacccgagtgaaatggaatggaatcgaaaggaatggaatggaatgggatggaatggattggaatggaatggaatagaatggaattgcatcaacccgagtggaatggaatagaagggaatggaagggaaggtcagggaatggaaaggaatggattggaatggaatggaattgaatcaactggaatggaatggaatggaatggaatggaattgaatcaacctgagtggaatgaatggaatgaaatgcaatggaatggaatcaacccgagtggggtggaatggaatggaatggaatcattgggaatggaatggaatagaatggaatggaatgaaatggaacgcaatggaatgaaatggaaaggaatcaacgcgactggaatggaatggaatggaatggaaatactggaatggaatggaatggaatcaacccggtggagtgggatggaatggaatggaatggaattgaatgaaattgaatggaatggaatgtaatggattcaacacgagtgcaatggaatggaatggaatgaaaccgagtggaatgtaatgtaatttaatgtaatgtaatggaatggaattgaatggaattgaatggaacagaatggaattgaatcaacgcgagtggaatggaatggattgcaatggaatggaatggaattgaatggaatagaatggaatggaatagaaggaattgaatcaactggaatcgaatggaatggaattgaatgtaatagaatggaattgattcaactggaatggaatggaatggaatggaaaggaatggaatggaatggaatcaactggaaagcaatgaaatggaatagaatggaattgaatcacctggaatggcttggaatggaatggaaaggaaaggaatggaatggaatggaatagaatgtaatagaatcaacccgattggaatggaatggaatggaatataatggaatggaatggaatagaatggaattgaatcaacatgaatggagtggagtggaatggaatggaatggaatggaattgtatggaatggaatagaatggaattaaatcaactggaatgcaatggaatggaatggaatggaatcaaaccgacagaaatggaatgtaatggaatggaattgaaaggaatggaatggaattgaatggaatggaattgaacgaacacgagtggaatggaatggaatggaatggaatggaagagagtggaattgaataaacaagagagtggaatggaaaggaatggaatggaatggaatagaatagaattgaatcaactggaatggaatggaatggaatgtaatggaatggaattgaatcaacccgagaggaatgtaatgtaatgtaatataatgtaatgtaatgtaatgtaatgtaatgtaatgtaatggaatggaattgaatggaattgaatggaacagaatggaattgaatcaacgcgagtggaatggaatggattgcaatggaatggaatggaattgaatggaatagaatggaatggaatagaaggaattgaatcaactggaatcgaatggaatggaattgaatggattagaagggaatggaatagaaggaattgaatcaactggaatcgaatgaaatggaatggaatggaattgaatgtaatagaatggaattgattcaactggaatggaatggaatggaaaggaatggaatggaatggaatcaactggaaagcaatgaaatggaatagaatggaattgaatcacctggaatggattggaatggaatggaaaggaaaggaatggaatggaatggaatagaatgtaatagaatcaacccgattggaatggaatggaatggaatggaatggaacggaagggaatggaatggaatgcaataggatgtaattaaatcatcccgagtggaatggaattgaatggattgcaatggaaaggaatctacacgagaggaatggaatggaatggaatggagtggagaggagtggaatggaacggaatggaattgaacgcagtggaatggaatagaatggaatcaacgcgagtgcaaaggaatggaatggagtggaatggaatggaataaaatggaatgcaatgaaatggaatggaatcaacccgagtgcagtggaatggaatggaatggtgtggaatggaatggaatggaatggaatgaaacagaatggaatggaatggaatggtatgtaatagaatggaatggaatggaattaaatcaacccgtgtggaatggcatggaatggaatagaatggaattgagtcaatccgaggggaatgcaatggaatggaatggaatggaatggaatttaatcaacccgagtggaatggaatggaatggattggagtcgagtggaatggactggaatggaatggaatcgaatggaatggaatggcatggaataaacccgagtggaatgtaatgtaatgcaatgggatgaaatggaatgaaatggaatagcaaggaattgaatcaacccgtgaggaaaggaatgaaatggaatggaatggaatagaatggaatggaatcaacccgagaggaatggaatggaatggaatggaatggaatggaatggaacggaattgaatttaatcaatccaagtacaatggaagagaatggagtggaatggaaagggttggaatcgaatggaatggaatgaaatggcatcaacccgaggggaatggaatggaatgtaatggaatgcaatgcaatggaatggaaaggaatggaatggaaaagaatggaattgaatgaactggaatggaatggaatggaatggaatcaacccgagtggaatggactggaatgcaatggaatggaatgaactgcaatggaatggaaaagaatggaattgaatcaattggaatggaatggaatggaatggaatataatagaattgaatcaactggaatggaatgggatggaattgatttgtattgaatggaattgaatcaactggaacggattggaaaggagtagaatggaattcaatcaactggaatggaatggaatggactggactggaatggaatggaatggaatagattggaactgaatcaactctaatggaatggattggaatggcatggaatggaatggatttgaatcaacccaagtggaacggaatggaatggaatggaatggaagggaatggaatggaatgcaatagaatggaattgaatcaacatgagtggaatggagtggaatggaatggaatcaacacgagtggaatgaaatggattggagtggtgtggaatggaaaggaatggaatggaatggaatggagtggaatggaatggaatggaatggagtggaatggaatggaatggaatggaatggagtataatggaatggaatggaatggaatggagtgtaacggaatggaatggaattaaccccagtggaaagggatgggatggagtggaatggaatggaatggaatggaatgaaatggaaccaaccagagtggcgtggaatggaatggaatggaatggaacagaatggaagggaatcaaccagaatggaatggaatggaatggaatggaacggaatggaagggaatcaaccagaatggaatggaatggaattaaatcaacccgtgtggaatggaatggaatggaatggaataggatggaattgagtcaaccttagtgtaatataatgcaatgcaatggaatggaatggaatggaatggaattgaatcaatccgagaggaatagaatggaatgcattggaatggaatggattggaagggaatgaaatggaatagaatggaattgaatgaactggaatggaatggaatggattggaatggaattgaatcaacaggaaaggaatggaaaggaatagaatggaattgcatcaactggaatggaatggaatggaatggattggaatggaatggaatggaatggaatagaatggaactgaatcaacccgaatggaatggattggaaaggcatggaatagaatggaatggaatggatatgaatcaacccgaatggaatggaaaggaatgaaatggaatagaacggaatggaatggaatggaatggaatcaacatgagaggaatggaatggaatggaatggattggagtggagttgaatggaatggaatggaacggaattgaatggagaggaatggaatggaatggaatagaatggaatggaatggagtggaatggaaaggaatagaatcaacccgattggaaagaaatggaatggaatggaacggaatggaatggaatggaatttaatcaacccgagtggaatggaatggaatggagtggagtggagtggaatggactggaatggaatggaatggcatggaatgcaatggaatggaatggaatcaacccgaatggaatggaatggaatggaatggaatagcatggagttcaatcaactggaatggaatggaatggaattgaatcaaccctggtggaatggaatggaattgaatagaatcaagtggaatggaatggaatagaatggaattttaataaacccgagtgaaatggaatggaatggattggaaaggaatgcaaagcaatggaagggaattgaatggaatagaatggaattgaatcatcccaagcgaaatggaatagaatggaatggagtggaatgaaacggaatggcatggaacggaacggaactgaacggaaagaaatggaatggaatagaatggaatgaaatggaacggaatttaatagaactaacccgttaggaatggaatggaatggaatggaatggaatggaatggaatggaatggaatggaatagattggaatggaatagaatgaaatggaatggaatggaatggaatggaatggaatggaatcaactggaaaggaatggaatggaatggaatagaatggaatggatttgaatggaatagaatcaacaggaatggaatggagtggaatggaatggaatggaatggaatggtatagaacgtaattgaaagaatccgagtggaatggaatggaatggaatagaatggaagagaatggaattgaatccacccgattggaatggaatggaatggaatgcaatgaaatggaatggaatggaatggaatggaatcgaatacaatggaactgaatcaacccgagtggaatggaatggaatggaatggtatggaaaggaatggaatagaatggaattgaatcaaatggaatggaattgaatggaatgttatagaatggaattgaatgacctggaatggaatgtaatggaaaggaatggaatggaatggaatggaatggaatggcatggaatcaacccaagtggaatgcaatggaatggtatggaatggaatggaatggagtagaatggaattgaatcaactggaatggaattgtatggaatggaatggagtggaatcaaatggaattaaatcaacctgagtggagcggaatggaatgcaatgaaannnnnnnnnnnnnnnnnnnnnnnnnnnnnnnnnnnnnnnnnnnnnnnnnnnnnnnnnnnnnnnnnnnnnnnnnnnnnnnnnnnnnnnnnnnnnnnnnnnnnnnnnnnnnnnnnnnnnnnnnnnnnnnnnnnnnnnnnnnnnnnnnnnnnnnnnnnnnnnnnnnnnnnnnnnnnnnnnnnnnnnnnnnnnnnnnnnnnnnnnnnnnnnnnnnnnnnnnnnnnnnnnnnnnnnnnnnnnnnnnnnnnnnnnnnnnnnnnnnnnnnnnnnnnnnnnnnnnnnnnnnnnnnnnnnnnnnnnnnnnnnnnnnnnnnnnnnnnnnnnnnnnnnnnnnnnnnnnnnnnnnnnnnnnnnnnnnnnnnnnnnnnnnnnnnnnnnnnnnnnnnnnnnnnnnnnnnnnnnnnnnnnnnnnnnnnnnnnnnnnnnnnnnnnnnnnnnnnnnnnnnnnnnnnnnnnnnnnnnnnnnnnnnnnnnnnnnnnnnnnnnnnnnnnnnnnnnnnnnnnnnnnnnnnnnnnnnnnnnnnnnnnnnnnnnnnnnnnnnnnnnnnnnnnnnnnnnnnnnnnnnnnnnnnnnnnnnnnnnnnnnnnnnnnnnnnnnnnnnnnnnnnnnnnnnnnnnnnnnnnnnnnnnnnnnnnnnnnnnnnnnnnnnnnnnnnnnnnnnnnnnnnnnnnnnnnnnnnnnnnnnnnnnnnnnnnnnnnnnnnnnnnnnnnnnnnnnnnnnnnnnnnnnnnnnnnnnnnnnnnnnnnnnnnnnnnnnnnnnnnnnnnnnnnnnnnnnnnnnnnnnnnnnnnnnnnnnnnnnnnnnnnnnnnnnnnnnnnnnnnnnnnnnnnnnnnnnnnnnnnnnnnnnnnnnnnnnnnnnnnnnnnnnnnnnnnnnnnnnnnnnnnnnnnnnnnnnnnnnnnnnnnnnnnnnnnnnnnnnnnnnnnnnnnnnnnnnnnnnnnnnnnnnnnnnnnnnnnnnnnnnnnnnnnnnnnnnnnnnnnnnnnnnnnnnnnnnnnnnnnnnnnnnnnnnnnnnnnnnnnnnnnnnnnnnnnnnnnnnnnnnnnnnnnnnnnnnnnnnnnnnnnnnnnnnnnnnnnnnnnnnnnnnnnnnnnnnnnnnnnnnnnnnnnnnnnnnnnnnnnnnnnnnnnnnnnnnnnnnnnnnnnnnnnnnnnnnnnnnnnnnnnnnnnnnnnnnnnnnnnnnnnnnnnnnnnnnnnnnnnnnnnnnnnnnnnnnnnnnnnnnnnnnnnnnnnnnnnnnnnnnnnnnnnnnnnnnnnnnnnnnnnnnnnnnnnnnnnnnnnnnnnnnnnnnnnnnnnnnnnnnnnnnnnnnnnnnnnnnnnnnnnnnnnnnnnnnnnnnnnnnnnnnnnnnnnnnnnnnnnnnnnnnnnnnnnnnnnnnnnnnnnnnnnnnnnnnnnnnnnnnnnnnnnnnnnnnnnnnnnnnnnnnnnnnnnnnnnnnnnnnnnnnnnnnnnnnnnnnnnnnnnnnnnnnnnnnnnnnnnnnnnnnnnnnnnnnnnnnnnnnnnnnnnnnnnnnnnnnnnnnnnnnnnnnnnnnnnnnnnnnnnnnnnnnnnnnnnnnnnnnnnnnnnnnnnnnnnnnnnnnnnnnnnnnnnnnnnnnnnnnnnnnnnnnnnnnnnnnnnnnnnnnnnnnnnnnnnnnnnnnnnnnnnnnnnnnnnnnnnnnnnnnnnnnnnnnnnnnnnnnnnnnnnnnnnnnnnnnnnnnnnnnnnnnnnnnnnnnnnnnnnnnnnnnnnnnnnnnnnnnnnnnnnnnnnnnnnnnnnnnnnnnnnnnnnnnnnnnnnnnnnnnnnnnnnnnnnnnnnnnnnnnnnnnnnnnnnnnnnnnnnnnnnnnnnnnnnnnnnnnnnnnnnnnnnnnnnnnnnnnnnnnnnnnnnnnnnnnnnnnnnnnnnnnnnnnnnnnnnnnnnnnnnnnnnnnnnnnnnnnnnnnnnnnnnnnnnnnnnnnnnnnnnnnnnnnnnnnnnnnnnnnnnnnnnnnnnnnnnnnnnnnnnnnnnnnnnnnnnnnnnnnnnnnnnnnnnnnnnnnnnnnnnnnnnnnnnnnnnnnnnnnnnnnnnnnnnnnnnnnnnnnnnnnnnnnnnnnnnnnnnnnnnnnnnnnnnnnnnnnnnnnnnnnnnnnnnnnnnnnnnnnnnnnnnnnnnnnnnnnnnnnnnnnnnnnnnnnnnnnnnnnnnnnnnnnnnnnnnnnnnnnnnnnnnnnnnnnnnnnnnnnnnnnnnnnnnnnnnnnnnnnnnnnnnnnnnnnnnnnnnnnnnnnnnnnnnnnnnnnnnnnnnnnnnnnnnnnnnnnnnnnnnnnnnnnnnnnnnnnnnnnnnnnnnnnnnnnnnnnnnnnnnnnnnnnnnnnnnnnnnnnnnnnnnnnnnnnnnnnnnnnnnnnnnnnnnnnnnnnnnnnnnnnnnnnnnnnnnnnnnnnnnnnnnnnnnnnnnnnnnnnnnnnnnnnnnnnnnnnnnnnnnnnnnnnnnnnnnnnnnnnnnnnnnnnnnnnnnnnnnnnnnnnnnnnnnnnnnnnnnnnnnnnnnnnnnnnnnnnnnnnnnnnnnnnnnnnnnnnnnnnnnnnnnnnnnnnnnnnnnnnnnnnnnnnnnnnnnnnnnnnnnnnnnnnnnnnnnnnnnnnnnnnnnnnnnnnnnnnnnnnnnnnnnnnnnnnnnnnnnnnnnnnnnnnnnnnnnnnnnnnnnnnnnnnnnnnnnnnnnnnnnnnnnnnnnnnnnnnnnnnnnnnnnnnnnnnnnnnnnnnnnnnnnnnnnnnnnnnnnnnnnnnnnnnnnnnnnnnnnnnnnnnnnnnnnnnnnnnnnnnnnnnnnnnnnnnnnnnnnnnnnnnnnnnnnnnnnnnnnnnnnnnnnnnnnnnnnnnnnnnnnnnnnnnnnnnnnnnnnnnnnnnnnnnnnnnnnnnnnnnnnnnnnnnnnnnnnnnnnnnnnnnnnnnnnnnnnnnnnnnnnnnnnnnnnnnnnnnnnnnnnnnnnnnnnnnnnnnnnnnnnnnnnnnnnnnnnnnnnnnnnnnnnnnnnnnnnnnnnnnnnnnnnnnnnnnnnnnnnnnnnnnnnnnnnnnnnnnnnnnnnnnnnnnnnnnnnnnnnnnnnnnnnnnnnnnnnnnnnnnnnnnnnnnnnnnnnnnnnnnnnnnnnnnnnnnnnnnnnnnnnnnnnnnnnnnnnnnnnnnnnnnnnnnnnnnnnnnnnnnnnnnnnnnnnnnnnnnnnnnnnnnnnnnnnnnnnnnnnnnnnnnnnnnnnnnnnnnnnnnnnnnnnnnnnnnnnnnnnnnnnnnnnnnnnnnnnnnnnnnnnnnnnnnnnnnnnnnnnnnnnnnnnnnnnnnnnnnnnnnnnnnnnnnnnnnnnnnnnnnnnnnnnnnnnnnnnnnnnnnnnnnnnnnnnnnnnnnnnnnnnnnnnnnnnnnnnnnnnnnnnnnnnnnnnnnnnnnnnnnnnnnnnnnnnnnnnnnnnnnnnnnnnnnnnnnnnnnnnnnnnnnnnnnnnnnnnnnnnnnnnnnnnnnnnnnnnnnnnnnnnnnnnnnnnnnnnnnnnnnnnnnnnnnnnnnnnnnnnnnnnnnnnnnnnnnnnnnnnnnnnnnnnnnnnnnnnnnnnnnnnnnnnnnnnnnnnnnnnnnnnnnnnnnnnnnnnnnnnnnnnnnnnnnnnnnnnnnnnnnnnnnnnnnnnnnnnnnnnnnnnnnnnnnnnnnnnnnnnnnnnnnnnnnnnnnnnnnnnnnnnnnnnnnnnnnnnnnnnnnnnnnnnnnnnnnnnnnnnnnnnnnnnnnnnnnnnnnnnnnnnnnnnnnnnnnnnnnnnnnnnnnnnnnnnnnnnnnnnnnnnnnnnnnnnnnnnnnnnnnnnnnnnnnnnnnnnnnnnnnnnnnnnnnnnnnnnnnnnnnnnnnnnnnnnnnnnnnnnnnnnnnnnnnnnnnnnnnnnnnnnnnnnnnnnnnnnnnnnnnnnnnnnnnnnnnnnnnnnnnnnnnnnnnnnnnnnnnnnnnnnnnnnnnnnnnnnnnnnnnnnnnnnnnnnnnnnnnnnnnnnnnnnnnnnnnnnnnnnnnnnnnnnnnnnnnnnnnnnnnnnnnnnnnnnnnnnnnnnnnnnnnnnnnnnnnnnnnnnnnnnnnnnnnnnnnnnnnnnnnnnnnnnnnnnnnnnnnnnnnnnnnnnnnnnnnnnnnnnnnnnnnnnnnnnnnnnnnnnnnnnnnnnnnnnnnnnnnnnnnnnnnnnnnnnnnnnnnnnnnnnnnnnnnnnnnnnnnnnnnnnnnnnnnnnnnnnnnnnnnnnnnnnnnnnnnnnnnnnnnnnnnnnnnnnnnnnnnnnnnnnnnnnnnnnnnnnnnnnnnnnnnnnnnnnnnnnnnnnnnnnnnnnnnnnnnnnnnnnnnnnnnnnnnnnnnnnnnnnnnnnnnnnnnnnnnnnnnnnnnnnnnnnnnnnnnnnnnnnnnnnnnnnnnnnnnnnnnnnnnnnnnnnnnnnnnnnnnnnnnnnnnnnnnnnnnnnnnnnnnnnnnnnnnnnnnnnnnnnnnnnnnnnnnnnnnnnnnnnnnnnnnnnnnnnnnnnnnnnnnnnnnnnnnnnnnnnnnnnnnnnnnnnnnnnnnnnnnnnnnnnnnnnnnnnnnnnnnnnnnnnnnnnnnnnnnnnnnnnnnnnnnnnnnnnnnnnnnnnnnnnnnnnnnnnnnnnnnnnnnnnnnnnnnnnnnnnnnnnnnnnnnnnnnnnnnnnnnnnnnnnnnnnnnnnnnnnnnnnnnnnnnnnnnnnnnnnnnnnnnnnnnnnnnnnnnnnnnnnnnnnnnnnnnnnnnnnnnnnnnnnnnnnnnnnnnnnnnnnnnnnnnnnnnnnnnnnnnnnnnnnnnnnnnnnnnnnnnnnnnnnnnnnnnnnnnnnnnnnnnnnnnnnnnnnnnnnnnnnnnnnnnnnnnnnnnnnnnnnnnnnnnnnnnnnnnnnnnnnnnnnnnnnnnnnnnnnnnnnnnnnnnnnnnnnnnnnnnnnnnnnnnnnnnnnnnnnnnnnnnnnnnnnnnnnnnnnnnnnnnnnnnnnnnnnnnnnnnnnnnnnnnnnnnnnnnnnnnnnnnnnnnnnnnnnnnnnnnnnnnnnnnnnnnnnnnnnnnnnnnnnnnnnnnnnnnnnnnnnnnnnnnnnnnnnnnnnnnnnnnnnnnnnnnnnnnnnnnnnnnnnnnnnnnnnnnnnnnnnnnnnnnnnnnnnnnnnnnnnnnnnnnnnnnnnnnnnnnnnnnnnnnnnnnnnnnnnnnnnnnnnnnnnnnnnnnnnnnnnnnnnnnnnnnnnnnnnnnnnnnnnnnnnnnnnnnnnnnnnnnnnnnnnnnnnnnnnnnnnnnnnnnnnnnnnnnnnnnnnnnnnnnnnnnnnnnnnnnnnnnnnnnnnnnnnnnnnnnnnnnnnnnnnnnnnnnnnnnnnnnnnnnnnnnnnnnnnnnnnnnnnnnnnnnnnnnnnnnnnnnnnnnnnnnnnnnnnnnnnnnnnnnnnnnnnnnnnnnnnnnnnnnnnnnnnnnnnnnnnnnnnnnnnnnnnnnnnnnnnnnnnnnnnnnnnnnnnnnnnnnnnnnnnnnnnnnnnnnnnnnnnnnnnnnnnnnnnnnnnnnnnnnnnnnnnnnnnnnnnnnnnnnnnnnnnnnnnnnnnnnnnnnnnnnnnnnnnnnnnnnnnnnnnnnnnnnnnnnnnnnnnnnnnnnnnnnnnnnnnnnnnnnnnnnnnnnnnnnnnnnnnnnnnnnnnnnnnnnnnnnnnnnnnnnnnnnnnnnnnnnnnnnnnnnnnnnnnnnnnnnnnnnnnnnnnnnnnnnnnnnnnnnnnnnnnnnnnnnnnnnnnnnnnnnnnnnnnnnnnnnnnnnnnnnnnnnnnnnnnnnnnnnnnnnnnnnnnnnnnnnnnnnnnnnnnnnnnnnnnnnnnnnnnnnnnnnnnnnnnnnnnnnnnnnnnnnnnnnnnnnnnnnnnnnnnnnnnnnnnnnnnnnnnnnnnnnnnnnnnnnnnnnnnnnnnnnnnnnnnnnnnnnnnnnnnnnnnnnnnnnnnnnnnnnnnnnnnnnnnnnnnnnnnnnnnnnnnnnnnnnnnnnnnnnnnnnnnnnnnnnnnnnnnnnnnnnnnnnnnnnnnnnnnnnnnnnnnnnnnnnnnnnnnnnnnnnnnnnnnnnnnnnnnnnnnnnnnnnnnnnnnnnnnnnnnnnnnnnnnnnnnnnnnnnnnnnnnnnnnnnnnnnnnnnnnnnnnnnnnnnnnnnnnnnnnnnnnnnnnnnnnnnnnnnnnnnnnnnnnnnnnnnnnnnnnnnnnnnnnnnnnnnnnnnnnnnnnnnnnnnnnnnnnnnnnnnnnnnnnnnnnnnnnnnnnnnnnnnnnnnnnnnnnnnnnnnnnnnnnnnnnnnnnnnnnnnnnnnnnnnnnnnnnnnnnnnnnnnnnnnnnnnnnnnnnnnnnnnnnnnnnnnnnnnnnnnnnnnnnnnnnnnnnnnnnnnnnnnnnnnnnnnnnnnnnnnnnnnnnnnnnnnnnnnnnnnnnnnnnnnnnnnnnnnnnnnnnnnnnnnnnnnnnnnnnnnnnnnnnnnnnnnnnnnnnnnnnnnnnnnnnnnnnnnnnnnnnnnnnnnnnnnnnnnnnnnnnnnnnnnnnnnnnnnnnnnnnnnnnnnnnnnnnnnnnnnnnnnnnnnnnnnnnnnnnnnnnnnnnnnnnnnnnnnnnnnnnnnnnnnnnnnnnnnnnnnnnnnnnnnnnnnnnnnnnnnnnnnnnnnnnnnnnnnnnnnnnnnnnnnnnnnnnnnnnnnnnnnnnnnnnnnnnnnnnnnnnnnnnnnnnnnnnnnnnnnnnnnnnnnnnnnnnnnnnnnnnnnnnnnnnnnnnnnnnnnnnnnnnnnnnnnnnnnnnnnnnnnnnnnnnnnnnnnnnnnnnnnnnnnnnnnnnnnnnnnnnnnnnnnnnnnnnnnnnnnnnnnnnnnnnnnnnnnnnnnnnnnnnnnnnnnnnnnnnnnnnnnnnnnnnnnnnnnnnnnnnnnnnnnnnnnnnnnnnnnnnnnnnnnnnnnnnnnnnnnnnnnnnnnnnnnnnnnnnnnnnnnnnnnnnnnnnnnnnnnnnnnnnnnnnnnnnnnnnnnnnnnnnnnnnnnnnnnnnnnnnnnnnnnnnnnnnnnnnnnnnnnnnnnnnnnnnnnnnnnnnnnnnnnnnnnnnnnnnnnnnnnnnnnnnnnnnnnnnnnnnnnnnnnnnnnnnnnnnnnnnnnnnnnnnnnnnnnnnnnnnnnnnnnnnnnnnnnnnnnnnnnnnnnnnnnnnnnnnnnnnnnnnnnnnnnnnnnnnnnnnnnnnnnnnnnnnnnnnnnnnnnnnnnnnnnnnnnnnnnnnnnnnnnnnnnnnnnnnnnnnnnnnnnnnnnnnnnnnnnnnnnnnnnnnnnnnnnnnnnnnnnnnnnnnnnnnnnnnnnnnnnnnnnnnnnnnnnnnnnnnnnnnnnnnnnnnnnnnnnnnnnnnnnnnnnnnnnnnnnnnnnnnnnnnnnnnnnnnnnnnnnnnnnnnnnnnnnnnnnnnnnnnnnnnnnnnnnnnnnnnnnnnnnnnnnnnnnnnnnnnnnnnnnnnnnnnnnnnnnnnnnnnnnnnnnnnnnnnnnnnnnnnnnnnnnnnnnnnnnnnnnnnnnnnnnnnnnnnnnnnnnnnnnnnnnnnnnnnnnnnnnnnnnnnnnnnnnnnnnnnnnnnnnnnnnnnnnnnnnnnnnnnnnnnnnnnnnnnnnnnnnnnnnnnnnnnnnnnnnnnnnnnnnnnnnnnnnnnnnnnnnnnnnnnnnnnnnnnnnnnnnnnnnnnnnnnnnnnnnnnnnnnnnnnnnnnnnnnnnnnnnnnnnnnnnnnnnnnnnnnnnnnnnnnnnnnnnnnnnnnnnnnnnnnnnnnnnnnnnnnnnnnnnnnnnnnnnnnnnnnnnnnnnnnnnnnnnnnnnnnnnnnnnnnnnnnnnnnnnnnnnnnnnnnnnnnnnnnnnnnnnnnnnnnnnnnnnnnnnnnnnnnnnnnnnnnnnnnnnnnnnnnnnnnnnnnnnnnnnnnnnnnnnnnnnnnnnnnnnnnnnnnnnnnnnnnnnnnnnnnnnnnnnnnnnnnnnnnnnnnnnnnnnnnnnnnnnnnnnnnnnnnnnnnnnnnnnnnnnnnnnnnnnnnnnnnnnnnnnnnnnnnnnnnnnnnnnnnnnnnnnnnnnnnnnnnnnnnnnnnnnnnnnnnnnnnnnnnnnnnnnnnnnnnnnnnnnnnnnnnnnnnnnnnnnnnnnnnnnnnnnnnnnnnnnnnnnnnnnnnnnnnnnnnnnnnnnnnnnnnnnnnnnnnnnnnnnnnnnnnnnnnnnnnnnnnnnnnnnnnnnnnnnnnnnnnnnnnnnnnnnnnnnnnnnnnnnnnnnnnnnnnnnnnnnnnnnnnnnnnnnnnnnnnnnnnnnnnnnnnnnnnnnnnnnnnnnnnnnnnnnnnnnnnnnnnnnnnnnnnnnnnnnnnnnnnnnnnnnnnnnnnnnnnnnnnnnnnnnnnnnnnnnnnnnnnnnnnnnnnnnnnnnnnnnnnnnnnnnnnnnnnnnnnnnnnnnnnnnnnnnnnnnnnnnnnnnnnnnnnnnnnnnnnnnnnnnnnnnnnnnnnnnnnnnnnnnnnnnnnnnnnnnnnnnnnnnnnnnnnnnnnnnnnnnnnnnnnnnnnnnnnnnnnnnnnnnnnnnnnnnnnnnnnnnnnnnnnnnnnnnnnnnnnnnnnnnnnnnnnnnnnnnnnnnnnnnnnnnnnnnnnnnnnnnnnnnnnnnnnnnnnnnnnnnnnnnnnnnnnnnnnnnnnnnnnnnnnnnnnnnnnnnnnnnnnnnnnnnnnnnnnnnnnnnnnnnnnnnnnnnnnnnnnnnnnnnnnnnnnnnnnnnnnnnnnnnnnnnnnnnnnnnnnnnnnnnnnnnnnnnnnnnnnnnnnnnnnnnnnnnnnnnnnnnnnnnnnnnnnnnnnnnnnnnnnnnnnnnnnnnnnnnnnnnnnnnnnnnnnnnnnnnnnnnnnnnnnnnnnnnnnnnnnnnnnnnnnnnnnnnnnnnnnnnnnnnnnnnnnnnnnnnnnnnnnnnnnnnnnnnnnnnnnnnnnnnnnnnnnnnnnnnnnnnnnnnnnnnnnnnnnnnnnnnnnnnnnnnnnnnnnnnnnnnnnnnnnnnnnnnnnnnnnnnnnnnnnnnnnnnnnnnnnnnnnnnnnnnnnnnnnnnnnnnnnnnnnnnnnnnnnnnnnnnnnnnnnnnnnnnnnnnnnnnnnnnnnnnnnnnnnnnnnnnnnnnnnnnnnnnnnnnnnnnnnnnnnnnnnnnnnnnnnnnnnnnnnnnnnnnnnnnnnnnnnnnnnnnnnnnnnnnnnnnnnnnnnnnnnnnnnnnnnnnnnnnnnnnnnnnnnnnnnnnnnnnnnnnnnnnnnnnnnnnnnnnnnnnnnnnnnnnnnnnnnnnnnnnnnnnnnnnnnnnnnnnnnnnnnnnnnnnnnnnnnnnnnnnnnnnnnnnnnnnnnnnnnnnnnnnnnnnnnnnnnnnnnnnnnnnnnnnnnnnnnnnnnnnnnnnnnnnnnnnnnnnnnnnnnnnnnnnnnnnnnnnnnnnnnnnnnnnnnnnnnnnnnnnnnnnnnnnnnnnnnnnnnnnnnnnnnnnnnnnnnnnnnnnnnnnnnnnnnnnnnnnnnnnnnnnnnnnnnnnnnnnnnnnnnnnnnnnnnnnnnnnnnnnnnnnnnnnnnnnnnnnnnnnnnnnnnnnnnnnnnnnnnnnnnnnnnnnnnnnnnnnnnnnnnnnnnnnnnnnnnnnnnnnnnnnnnnnnnnnnnnnnnnnnnnnnnnnnnnnnnnnnnnnnnnnnnnnnnnnnnnnnnnnnnnnnnnnnnnnnnnnnnnnnnnnnnnnnnnnnnnnnnnnnnnnnnnnnnnnnnnnnnnnnnnnnnnnnnnnnnnnnnnnnnnnnnnnnnnnnnnnnnnnnnnnnnnnnnnnnnnnnnnnnnnnnnnnnnnnnnnnnnnnnnnnnnnnnnnnnnnnnnnnnnnnnnnnnnnnnnnnnnnnnnnnnnnnnnnnnnnnnnnnnnnnnnnnnnnnnnnnnnnnnnnnnnnnnnnnnnnnnnnnnnnnnnnnnnnnnnnnnnnnnnnnnnnnnnnnnnnnnnnnnnnnnnnnnnnnnnnnnnnnnnnnnnnnnnnnnnnnnnnnnnnnnnnnnnnnnnnnnnnnnnnnnnnnnnnnnnnnnnnnnnnnnnnnnnnnnnnnnnnnnnnnnnnnnnnnnnnnnnnnnnnnnnnnnnnnnnnnnnnnnnnnnnnnnnnnnnnnnnnnnnnnnnnnnnnnnnnnnnnnnnnnnnnnnnnnnnnnnnnnnnnnnnnnnnnnnnnnnnnnnnnnnnnnnnnnnnnnnnnnnnnnnnnnnnnnnnnnnnnnnnnnnnnnnnnnnnnnnnnnnnnnnnnnnnnnnnnnnnnnnnnnnnnnnnnnnnnnnnnnnnnnnnnnnnnnnnnnnnnnnnnnnnnnnnnnnnnnnnnnnnnnnnnnnnnnnnnnnnnnnnnnnnnnnnnnnnnnnnnnnnnnnnnnnnnnnnnnnnnnnnnnnnnnnnnnnnnnnnnnnnnnnnnnnnnnnnnnnnnnnnnnnnnnnnnnnnnnnnnnnnnnnnnnnnnnnnnnnnnnnnnnnnnnnnnnnnnnnnnnnnnnnnnnnnnnnnnnnnnnnnnnnnnnnnnnnnnnnnnnnnnnnnnnnnnnnnnnnnnnnnnnnnnnnnnnnnnnnnnnnnnnnnnnnnnnnnnnnnnnnnnnnnnnnnnnnnnnnnnnnnnnnnnnnnnnnnnnnnnnnnnnnnnnnnnnnnnnnnnnnnnnnnnnnnnnnnnnnnnnnnnnnnnnnnnnnnnnnnnnnnnnnnnnnnnnnnnnnnnnnnnnnnnnnnnnnnnnnnnnnnnnnnnnnnnnnnnnnnnnnnnnnnnnnnnnnnnnnnnnnnnnnnnnnnnnnnnnnnnnnnnnnnnnnnnnnnnnnnnnnnnnnnnnnnnnnnnnnnnnnnnnnnnnnnnnnnnnnnnnnnnnnnnnnnnnnnnnnnnnnnnnnnnnnnnnnnnnnnnnnnnnnnnnnnnnnnnnnnnnnnnnnnnnnnnnnnnnnnnnnnnnnnnnnnnnnnnnnnnnnnnnnnnnnnnnnnnnnnnnnnnnnnnnnnnnnnnnnnnnnnnnnnnnnnnnnnnnnnnnnnnnnnnnnnnnnnnnnnnnnnnnnnnnnnnnnnnnnnnnnnnnnnnnnnnnnnnnnnnnnnnnnnnnnnnnnnnnnnnnnnnnnnnnnnnnnnnnnnnnnnnnnnnnnnnnnnnnnnnnnnnnnnnnnnnnnnnnnnnnnnnnnnnnnnnnnnnnnnnnnnnnnnnnnnnnnnnnnnnnnnnnnnnnnnnnnnnnnnnnnnnnnnnnnnnnnnnnnnnnnnnnnnnnnnnnnnnnnnnnnnnnnnnnnnnnnnnnnnnnnnnnnnnnnnnnnnnnnnnnnnnnnnnnnnnnnnnnnnnnnnnnnnnnnnnnnnnnnnnnnnnnnnnnnnnnnnnnnnnnnnnnnnnnnnnnnnnnnnnnnnnnnnnnnnnnnnnnnnnnnnnnnnnnnnnnnnnnnnnnnnnnnnnnnnnnnnnnnnnnnnnnnnnnnnnnnnnnnnnnnnnnnnnnnnnnnnnnnnnnnnnnnnnnnnnnnnnnnnnnnnnnnnnnnnnnnnnnnnnnnnnnnnnnnnnnnnnnnnnnnnnnnnnnnnnnnnnnnnnnnnnnnnnnnnnnnnnnnnnnnnnnnnnnnnnnnnnnnnnnnnnnnnnnnnnnnnnnnnnnnnnnnnnnnnnnnnnnnnnnnnnnnnnnnnnnnnnnnnnnnnnnnnnnnnnnnnnnnnnnnnnnnnnnnnnnnnnnnnnnnnnnnnnnnnnnnnnnnnnnnnnnnnnnnnnnnnnnnnnnnnnnnnnnnnnnnnnnnnnnnnnnnnnnnnnnnnnnnnnnnnnnnnnnnnnnnnnnnnnnnnnnnnnnnnnnnnnnnnnnnnnnnnnnnnnnnnnnnnnnnnnnnnnnnnnnnnnnnnnnnnnnnnnnnnnnnnnnnnnnnnnnnnnnnnnnnnnnnnnnnnnnnnnnnnnnnnnnnnnnnnnnnnnnnnnnnnnnnnnnnnnnnnnnnnnnnnnnnnnnnnnnnnnnnnnnnnnnnnnnnnnnnnnnnnnnnnnnnnnnnnnnnnnnnnnnnnnnnnnnnnnnnnnnnnnnnnnnnnnnnnnnnnnnnnnnnnnnnnnnnnnnnnnnnnnnnnnnnnnnnnnnnnnnnnnnnnnnnnnnnnnnnnnnnnnnnnnnnnnnnnnnnnnnnnnnnnnnnnnnnnnnnnnnnnnnnnnnnnnnnnnnnnnnnnnnnnnnnnnnnnnnnnnnnnnnnnnnnnnnnnnnnnnnnnnnnnnnnnnnnnnnnnnnnnnnnnnnnnnnnnnnnnnnnnnnnnnnnnnnnnnnnnnnnnnnnnnnnnnnnnnnnnnnnnnnnnnnnnnnnnnnnnnnnnnnnnnnnnnnnnnnnnnnnnnnnnnnnnnnnnnnnnnnnnnnnnnnnnnnnnnnnnnnnnnnnnnnnnnnnnnnnnnnnnnnnnnnnnnnnnnnnnnnnnnnnnnnnnnnnnnnnnnnnnnnnnnnnnnnnnnnnnnnnnnnnnnnnnnnnnnnnnnnnnnnnnnnnnnnnnnnnnnnnnnnnnnnnnnnnnnnnnnnnnnnnnnnnnnnnnnnnnnnnnnnnnnnnnnnnnnnnnnnnnnnnnnnnnnnnnnnnnnnnnnnnnnnnnnnnnnnnnnnnnnnnnnnnnnnnnnnnnnnnnnnnnnnnnnnnnnnnnnnnnnnnnnnnnnnnnnnnnnnnnnnnnnnnnnnnnnnnnnnnnnnnnnnnnnnnnnnnnnnnnnnnnnnnnnnnnnnnnnnnnnnnnnnnnnnnnnnnnnnnnnnnnnnnnnnnnnnnnnnnnnnnnnnnnnnnnnnnnnnnnnnnnnnnnnnnnnnnnnnnnnnnnnnnnnnnnnnnnnnnnnnnnnnnnnnnnnnnnnnnnnnnnnnnnnnnnnnnnnnnnnnnnnnnnnnnnnnnnnnnnnnnnnnnnnnnnnnnnnnnnnnnnnnnnnnnnnnnnnnnnnnnnnnnnnnnnnnnnnnnnnnnnnnnnnnnnnnnnnnnnnnnnnnnnnnnnnnnnnnnnnnnnnnnnnnnnnnnnnnnnnnnnnnnnnnnnnnnnnnnnnnnnnnnnnnnnnnnnnnnnnnnnnnnnnnnnnnnnnnnnnnnnnnnnnnnnnnnnnnnnnnnnnnnnnnnnnnnnnnnnnnnnnnnnnnnnnnnnnnnnnnnnnnnnnnnnnnnnnnnnnnnnnnnnnnnnnnnnnnnnnnnnnnnnnnnnnnnnnnnnnnnnnnnnnnnnnnnnnnnnnnnnnnnnnnnnnnnnnnnnnnnnnnnnnnnnnnnnnnnnnnnnnnnnnnnnnnnnnnnnnnnnnnnnnnnnnnnnnnnnnnnnnnnnnnnnnnnnnnnnnnnnnnnnnnnnnnnnnnnnnnnnnnnnnnnnnnnnnnnnnnnnnnnnnnnnnnnnnnnnnnnnnnnnnnnnnnnnnnnnnnnnnnnnnnnnnnnnnnnnnnnnnnnnnnnnnnnnnnnnnnnnnnnnnnnnnnnnnnnnnnnnnnnnnnnnnnnnnnnnnnnnnnnnnnnnnnnnnnnnnnnnnnnnnnnnnnnnnnnnnnnnnnnnnnnnnnnnnnnnnnnnnnnnnnnnnnnnnnnnnnnnnnnnnnnnnnnnnnnnnnnnnnnnnnnnnnnnnnnnnnnnnnnnnnnnnnnnnnnnnnnnnnnnnnnnnnnnnnnnnnnnnnnnnnnnnnnnnnnnnnnnnnnnnnnnnnnnnnnnnnnnnnnnnnnnnnnnnnnnnnnnnnnnnnnnnnnnnnnnnnnnnnnnnnnnnnnnnnnnnnnnnnnnnnnnnnnnnnnnnnnnnnnnnnnnnnnnnnnnnnnnnnnnnnnnnnnnnnnnnnnnnnnnnnnnnnnnnnnnnnnnnnnnnnnnnnnnnnnnnnnnnnnnnnnnnnnnnnnnnnnnnnnnnnnnnnnnnnnnnnnnnnnnnnnnnnnnnnnnnnnnnnnnnnnnnnnnnnnnnnnnnnnnnnnnnnnnnnnnnnnnnnnnnnnnnnnnnnnnnnnnnnnnnnnnnnnnnnnnnnnnnnnnnnnnnnnnnnnnnnnnnnnnnnnnnnnnnnnnnnnnnnnnnnnnnnnnnnnnnnnnnnnnnnnnnnnnnnnnnnnnnnnnnnnnnnnnnnnnnnnnnnnnnnnnnnnnnnnnnnnnnnnnnnnnnnnnnnnnnnnnnnnnnnnnnnnnnnnnnnnnnnnnnnnnnnnnnnnnnnnnnnnnnnnnnnnnnnnnnnnnnnnnnnnnnnnnnnnnnnnnnnnnnnnnnnnnnnnnnnnnnnnnnnnnnnnnnnnnnnnnnnnnnnnnnnnnnnnnnnnnnnnnnnnnnnnnnnnnnnnnnnnnnnnnnnnnnnnnnnnnnnnnnnnnnnnnnnnnnnnnnnnnnnnnnnnnnnnnnnnnnnnnnnnnnnnnnnnnnnnnnnnnnnnnnnnnnnnnnnnnnnnnnnnnnnnnnnnnnnnnnnnnnnnnnnnnnnnnnnnnnnnnnnnnnnnnnnnnnnnnnnnnnnnnnnnnnnnnnnnnnnnnnnnnnnnnnnnnnnnnnnnnnnnnnnnnnnnnnnnnnnnnnnnnnnnnnnnnnnnnnnnnnnnnnnnnnnnnnnnnnnnnnnnnnnnnnnnnnnnnnnnnnnnnnnnnnnnnnnnnnnnnnnnnnnnnnnnnnnnnnnnnnnnnnnnnnnnnnnnnnnnnnnnnnnnnnnnnnnnnnnnnnnnnnnnnnnnnnnnnnnnnnnnnnnnnnnnnnnnnnnnnnnnnnnnnnnnnnnnnnnnnnnnnnnnnnnnnnnnnnnnnnnnnnnnnnnnnnnnnnnnnnnnnnnnnnnnnnnnnnnnnnnnnnnnnnnnnnnnnnnnnnnnnnnnnnnnnnnnnnnnnnnnnnnnnnnnnnnnnnnnnnnnnnnnnnnnnnnnnnnnnnnnnnnnnnnnnnnnnnnnnnnnnnnnnnnnnnnnnnnnnnnnnnnnnnnnnnnnnnnnnnnnnnnnnnnnnnnnnnnnnnnnnnnnnnnnnnnnnnnnnnnnnnnnnnnnnnnnnnnnnnnnnnnnnnnnnnnnnnnnnnnnnnnnnnnnnnnnnnnnnnnnnnnnnnnnnnnnnnnnnnnnnnnnnnnnnnnnnnnnnnnnnnnnnnnnnnnnnnnnnnnnnnnnnnnnnnnnnnnnnnnnnnnnnnnnnnnnnnnnnnnnnnnnnnnnnnnnnnnnnnnnnnnnnnnnnnnnnnnnnnnnnnnnnnnnnnnnnnnnnnnnnnnnnnnnnnnnnnnnnnnnnnnnnnnnnnnnnnnnnnnnnnnnnnnnnnnnnnnnnnnnnnnnnnnnnnnnnnnnnnnnnnnnnnnnnnnnnnnnnnnnnnnnnnnnnnnnnnnnnnnnnnnnnnnnnnnnnnnnnnnnnnnnnnnnnnnnnnnnnnnnnnnnnnnnnnnnnnnnnnnnnnnnnnnnnnnnnnnnnnnnnnnnnnnnnnnnnnnnnnnnnnnnnnnnnnnnnnnnnnnnnnnnnnnnnnnnnnnnnnnnnnnnnnnnnnnnnnnnnnnnnnnnnnnnnnnnnnnnnnnnnnnnnnnnnnnnnnnnnnnnnnnnnnnnnnnnnnnnnnnnnnnnnnnnnnnnnnnnnnnnnnnnnnnnnnnnnnnnnnnnnnnnnnnnnnnnnnnnnnnnnnnnnnnnnnnnnnnnnnnnnnnnnnnnnnnnnnnnnnnnnnnnnnnnnnnnnnnnnnnnnnnnnnnnnnnnnnnnnnnnnnnnnnnnnnnnnnnnnnnnnnnnnnnnnnnnnnnnnnnnnnnnnnnnnnnnnnnnnnnnnnnnnnnnnnnnnnnnnnnnnnnnnnnnnnnnnnnnnnnnnnnnnnnnnnnnnnnnnnnnnnnnnnnnnnnnnnnnnnnnnnnnnnnnnnnnnnnnnnnnnnnnnnnnnnnnnnnnnnnnnnnnnnnnnnnnnnnnnnnnnnnnnnnnnnnnnnnnnnnnnnnnnnnnnnnnnnnnnnnnnnnnnnnnnnnnnnnnnnnnnnnnnnnnnnnnnnnnnnnnnnnnnnnnnnnnnnnnnnnnnnnnnnnnnnnnnnnnnnnnnnnnnnnnnnnnnnnnnnnnnnnnnnnnnnnnnnnnnnnnnnnnnnnnnnnnnnnnnnnnnnnnnnnnnnnnnnnnnnnnnnnnnnnnnnnnnnnnnnnnnnnnnnnnnnnnnnnnnnnnnnnnnnnnnnnnnnnnnnnnnnnnnnnnnnnnnnnnnnnnnnnnnnnnnnnnnnnnnnnnnnnnnnnnnnnnnnnnnnnnnnnnnnnnnnnnnnnnnnnnnnnnnnnnnnnnnnnnnnnnnnnnnnnnnnnnnnnnnnnnnnnnnnnnnnnnnnnnnnnnnnnnnnnnnnnnnnnnnnnnnnnnnnnnnnnnnnnnnnnnnnnnnnnnnnnnnnnnnnnnnnnnnnnnnnnnnnnnnnnnnnnnnnnnnnnnnnnnnnnnnnnnnnnnnnnnnnnnnnnnnnnnnnnnnnnnnnnnnnnnnnnnnnnnnnnnnnnnnnnnnnnnnnnnnnnnnnnnnnnnnnnnnnnnnnnnnnnnnnnnnnnnnnnnnnnnnnnnnnnnnnnnnnnnnnnnnnnnnnnnnnnnnnnnnnnnnnnnnnnnnnnnnnnnnnnnnnnnnnnnnnnnnnnnnnnnnnnnnnnnnnnnnnnnnnnnnnnnnnnnnnnnnnnnnnnnnnnnnnnnnnnnnnnnnnnnnnnnnnnnnnnnnnnnnnnnnnnnnnnnnnnnnnnnnnnnnnnnnnnnnnnnnnnnnnnnnnnnnnnnnnnnnnnnnnnnnnnnnnnnnnnnnnnnnnnnnnnnnnnnnnnnnnnnnnnnnnnnnnnnnnnnnnnnnnnnnnnnnnnnnnnnnnnnnnnnnnnnnnnnnnnnnnnnnnnnnnnnnnnnnnnnnnnnnnnnnnnnnnnnnnnnnnnnnnnnnnnnnnnnnnnnnnnnnnnnnnnnnnnnnnnnnnnnnnnnnnnnnnnnnnnnnnnnnnnnnnnnnnnnnnnnnnnnnnnnnnnnnnnnnnnnnnnnnnnnnnnnnnnnnnnnnnnnnnnnnnnnnnnnnnnnnnnnnnnnnnnnnnnnnnnnnnnnnnnnnnnnnnnnnnnnnnnnnnnnnnnnnnnnnnnnnnnnnnnnnnnnnnnnnnnnnnnnnnnnnnnnnnnnnnnnnnnnnnnnnnnnnnnnnnnnnnnnnnnnnnnnnnnnnnnnnnnnnnnnnnnnnnnnnnnnnnnnnnnnnnnnnnnnnnnnnnnnnnnnnnnnnnnnnnnnnnnnnnnnnnnnnnnnnnnnnnnnnnnnnnnnnnnnnnnnnnnnnnnnnnnnnnnnnnnnnnnnnnnnnnnnnnnnnnnnnnnnnnnnnnnnnnnnnnnnnnnnnnnnnnnnnnnnnnnnnnnnnnnnnnnnnnnnnnnnnnnnnnnnnnnnnnnnnnnnnnnnnnnnnnnnnnnnnnnnnnnnnnnnnnnnnnnnnnnnnnnnnnnnnnnnnnnnnnnnnnnnnnnnnnnnnnnnnnnnnnnnnnnnnnnnnnnnnnnnnnnnnnnnnnnnnnnnnnnnnnnnnnnnnnnnnnnnnnnnnnnnnnnnnnnnnnnnnnnnnnnnnnnnnnnnnnnnnnnnnnnnnnnnnnnnnnnnnnnnnnnnnnnnnnnnnnnnnnnnnnnnnnnnnnnnnnnnnnnnnnnnnnnnnnnnnnnnnnnnnnnnnnnnnnnnnnnnnnnnnnnnnnnnnnnnnnnnnnnnnnnnnnnnnnnnnnnnnnnnnnnnnnnnnnnnnnnnnnnnnnnnnnnnnnnnnnnnnnnnnnnnnnnnnnnnnnnnnnnnnnnnnnnnnnnnnnnnnnnnnnnnnnnnnnnnnnnnnnnnnnnnnnnnnnnnnnnnnnnnnnnnnnnnnnnnnnnnnnnnnnnnnnnnnnnnnnnnnnnnnnnnnnnnnnnnnnnnnnnnnnnnnnnnnnnnnnnnnnnnnnnnnnnnnnnnnnnnnnnnnnnnnnnnnnnnnnnnnnnnnnnnnnnnnnnnnnnnnnnnnnnnnnnnnnnnnnnnnnnnnnnnnnnnnnnnnnnnnnnnnnnnnnnnnnnnnnnnnnnnnnnnnnnnnnnnnnnnnnnnnnnnnnnnnnnnnnnnnnnnnnnnnnnnnnnnnnnnnnnnnnnnnnnnnnnnnnnnnnnnnnnnnnnnnnnnnnnnnnnnnnnnnnnnnnnnnnnnnnnnnnnnnnnnnnnnnnnnnnnnnnnnnnnnnnnnnnnnnnnnnnnnnnnnnnnnnnnnnnnnnnnnnnnnnnnnnnnnnnnnnnnnnnnnnnnnnnnnnnnnnnnnnnnnnnnnnnnnnnnnnnnnnnnnnnnnnnnnnnnnnnnnnnnnnnnnnnnnnnnnnnnnnnnnnnnnnnnnnnnnnnnnnnnnnnnnnnnnnnnnnnnnnnnnnnnnnnnnnnnnnnnnnnnnnnnnnnnnnnnnnnnnnnnnnnnnnnnnnnnnnnnnnnnnnnnnnnnnnnnnnnnnnnnnnnnnnnnnnnnnnnnnnnnnnnnnnnnnnnnnnnnnnnnnnnnnnnnnnnnnnnnnnnnnnnnnnnnnnnnnnnnnnnnnnnnnnnnnnnnnnnnnnnnnnnnnnnnnnnnnnnnnnnnnnnnnnnnnnnnnnnnnnnnnnnnnnnnnnnnnnnnnnnnnnnnnnnnnnnnnnnnnnnnnnnnnnnnnnnnnnnnnnnnnnnnnnnnnnnnnnnnnnnnnnnnnnnnnnnnnnnnnnnnnnnnnnnnnnnnnnnnnnnnnnnnnnnnnnnnnnnnnnnnnnnnnnnnnnnnnnnnnnnnnnnnnnnnnnnnnnnnnnnnnnnnnnnnnnnnnnnnnnnnnnnnnnnnnnnnnnnnnnnnnnnnnnnnnnnnnnnnnnnnnnnnnnnnnnnnnnnnnnnnnnnnnnnnnnnnnnnnnnnnnnnnnnnnnnnnnnnnnnnnnnnnnnnnnnnnnnnnnnnnnnnnnnnnnnnnnnnnnnnnnnnnnnnnnnnnnnnnnnnnnnnnnnnnnnnnnnnnnnnnnnnnnnnnnnnnnnnnnnnnnnnnnnnnnnnnnnnnnnnnnnnnnnnnnnnnnnnnnnnnnnnnnnnnnnnnnnnnnnnnnnnnnnnnnnnnnnnnnnnnnnnnnnnnnnnnnnnnnnnnnnnnnnnnnnnnnnnnnnnnnnnnnnnnnnnnnnnnnnnnnnnnnnnnnnnnnnnnnnnnnnnnnnnnnnnnnnnnnnnnnnnnnnnnnnnnnnnnnnnnnnnnnnnnnnnnnnnnnnnnnnnnnnnnnnnnnnnnnnnnnnnnnnnnnnnnnnnnnnnnnnnnnnnnnnnnnnnnnnnnnnnnnnnnnnnnnnnnnnnnnnnnnnnnnnnnnnnnnnnnnnnnnnnnnnnnnnnnnnnnnnnnnnnnnnnnnnnnnnnnnnnnnnnnnnnnnnnnnnnnnnnnnnnnnnnnnnnnnnnnnnnnnnnnnnnnnnnnnnnnnnnnnnnnnnnnnnnnnnnnnnnnnnnnnnnnnnnnnnnnnnnnnnnnnnnnnnnnnnnnnnnnnnnnnnnnnnnnnnnnnnnnnnnnnnnnnnnnnnnnnnnnnnnnnnnnnnnnnnnnnnnnnnnnnnnnnnnnnnnnnnnnnnnnnnnnnnnnnnnnnnnnnnnnnnnnnnnnnnnnnnnnnnnnnnnnnnnnnnnnnnnnnnnnnnnnnnnnnnnnnnnnnnnnnnnnnnnnnnnnnnnnnnnnnnnnnnnnnnnnnnnnnnnnnnnnnnnnnnnnnnnnnnnnnnnnnnnnnnnnnnnnnnnnnnnnnnnnnnnnnnnnnnnnnnnnnnnnnnnnnnnnnnnnnnnnnnnnnnnnnnnnnnnnnnnnnnnnnnnnnnnnnnnnnnnnnnnnnnnnnnnnnnnnnnnnnnnnnnnnnnnnnnnnnnnnnnnnnnnnnnnnnnnnnnnnnnnnnnnnnnnnnnnnnnnnnnnnnnnnnnnnnnnnnnnnnnnnnnnnnnnnnnnnnnnnnnnnnnnnnnnnnnnnnnnnnnnnnnnnnnnnnnnnnnnnnnnnnnnnnnnnnnnnnnnnnnnnnnnnnnnnnnnnnnnnnnnnnnnnnnnnnnnnnnnnnnnnnnnnnnnnnnnnnnnnnnnnnnnnnnnnnnnnnnnnnnnnnnnnnnnnnnnnnnnnnnnnnnnnnnnnnnnnnnnnnnnnnnnnnnnnnnnnnnnnnnnnnnnnnnnnnnnnnnnnnnnnnnnnnnnnnnnnnnnnnnnnnnnnnnnnnnnnnnnnnnnnnnnnnnnnnnnnnnnnnnnnnnnnnnnnnnnnnnnnnnnnnnnnnnnnnnnnnnnnnnnnnnnnnnnnnnnnnnnnnnnnnnnnnnnnnnnnnnnnnnnnnnnnnnnnnnnnnnnnnnnnnnnnnnnnnnnnnnnnnnnnnnnnnnnnnnnnnnnnnnnnnnnnnnnnnnnnnnnnnnnnnnnnnnnnnnnnnnnnnnnnnnnnnnnnnnnnnnnnnnnnnnnnnnnnnnnnnnnnnnnnnnnnnnnnnnnnnnnnnnnnnnnnnnnnnnnnnnnnnnnnnnnnnnnnnnnnnnnnnnnnnnnnnnnnnnnnnnnnnnnnnnnnnnnnnnnnnnnnnnnnnnnnnnnnnnnnnnnnnnnnnnnnnnnnnnnnnnnnnnnnnnnnnnnnnnnnnnnnnnnnnnnnnnnnnnnnnnnnnnnnnnnnnnnnnnnnnnnnnnnnnnnnnnnnnnnnnnnnnnnnnnnnnnnnnnnnnnnnnnnnnnnnnnnnnnnnnnnnnnnnnnnnnnnnnnnnnnnnnnnnnnnnnnnnnnnnnnnnnnnnnnnnnnnnnnnnnnnnnnnnnnnnnnnnnnnnnnnnnnnnnnnnnnnnnnnnnnnnnnnnnnnnnnnnnnnnnnnnnnnnnnnnnnnnnnnnnnnnnnnnnnnnnnnnnnnnnnnnnnnnnnnnnnnnnnnnnnnnnnnnnnnnnnnnnnnnnnnnnnnnnnnnnnnnnnnnnnnnnnnnnnnnnnnnnnnnnnnnnnnnnnnnnnnnnnnnnnnnnnnnnnnnnnnnnnnnnnnnnnnnnnnnnnnnnnnnnnnnnnnnnnnnnnnnnnnnnnnnnnnnnnnnnnnnnnnnnnnnnnnnnnnnnnnnnnnnnnnnnnnnnnnnnnnnnnnnnnnnnnnnnnnnnnnnnnnnnnnnnnnnnnnnnnnnnnnnnnnnnnnnnnnnnnnnnnnnnnnnnnnnnnnnnnnnnnnnnnnnnnnnnnnnnnnnnnnnnnnnnnnnnnnnnnnnnnnnnnnnnnnnnnnnnnnnnnnnnnnnnnnnnnnnnnnnnnnnnnnnnnnnnnnnnnnnnnnnnnnnnnnnnnnnnnnnnnnnnnnnnnnnnnnnnnnnnnnnnnnnnnnnnnnnnnnnnnnnnnnnnnnnnnnnnnnnnnnnnnnnnnnnnnnnnnnnnnnnnnnnnnnnnnnnnnnnnnnnnnnnnnnnnnnnnnnnnnnnnnnnnnnnnnnnnnnnnnnnnnnnnnnnnnnnnnnnnnnnnnnnnnnnnnnnnnnnnnnnnnnnnnnnnnnnnnnnnnnnnnnnnnnnnnnnnnnnnnnnnnnnnnnnnnnnnnnnnnnnnnnnnnnnnnnnnnnnnnnnnnnnnnnnnnnnnnnnnnnnnnnnnnnnnnnnnnnnnnnnnnnnnnnnnnnnnnnnnnnnnnnnnnnnnnnnnnnnnnnnnnnnnnnnnnnnnnnnnnnnnnnnnnnnnnnnnnnnnnnnnnnnnnnnnnnnnnnnnnnnnnnnnnnnnnnnnnnnnnnnnnnnnnnnnnnnnnnnnnnnnnnnnnnnnnnnnnnnnnnnnnnnnnnnnnnnnnnnnnnnnnnnnnnnnnnnnnnnnnnnnnnnnnnnnnnnnnnnnnnnnnnnnnnnnnnnnnnnnnnnnnnnnnnnnnnnnnnnnnnnnnnnnnnnnnnnnnnnnnnnnnnnnnnnnnnnnnnnnnnnnnnnnnnnnnnnnnnnnnnnnnnnnnnnnnnnnnnnnnnnnnnnnnnnnnnnnnnnnnnnnnnnnnnnnnnnnnnnnnnnnnnnnnnnnnnnnnnnnnnnnnnnnnnnnnnnnnnnnnnnnnnnnnnnnnnnnnnnnnnnnnnnnnnnnnnnnnnnnnnnnnnnnnnnnnnnnnnnnnnnnnnnnnnnnnnnnnnnnnnnnnnnnnnnnnnnnnnnnnnnnnnnnnnnnnnnnnnnnnnnnnnnnnnnnnnnnnnnnnnnnnnnnnnnnnnnnnnnnnnnnnnnnnnnnnnnnnnnnnnnnnnnnnnnnnnnnnnnnnnnnnnnnnnnnnnnnnnnnnnnnnnnnnnnnnnnnnnnnnnnnnnnnnnnnnnnnnnnnnnnnnnnnnnnnnnnnnnnnnnnnnnnnnnnnnnnnnnnnnnnnnnnnnnnnnnnnnnnnnnnnnnnnnnnnnnnnnnnnnnnnnnnnnnnnnnnnnnnnnnnnnnnnnnnnnnnnnnnnnnnnnnnnnnnnnnnnnnnnnnnnnnnnnnnnnnnnnnnnnnnnnnnnnnnnnnnnnnnnnnnnnnnnnnnnnnnnnnnnnnnnnnnnnnnnnnnnnnnnnnnnnnnnnnnnnnnnnnnnnnnnnnnnnnnnnnnnnnnnnnnnnnnnnnnnnnnnnnnnnnnnnnnnnnnnnnnnnnnnnnnnnnnnnnnnnnnnnnnnnnnnnnnnnnnnnnnnnnnnnnnnnnnnnnnnnnnnnnnnnnnnnnnnnnnnnnnnnnnnnnnnnnnnnnnnnnnnnnnnnnnnnnnnnnnnnnnnnnnnnnnnnnnnnnnnnnnnnnnnnnnnnnnnnnnnnnnnnnnnnnnnnnnnnnnnnnnnnnnnnnnnnnnnnnnnnnnnnnnnnnnnnnnnnnnnnnnnnnnnnnnnnnnnnnnnnnnnnnnnnnnnnnnnnnnnnnnnnnnnnnnnnnnnnnnnnnnnnnnnnnnnnnnnnnnnnnnnnnnnnnnnnnnnnnnnnnnnnnnnnnnnnnnnnnnnnnnnnnnnnnnnnnnnnnnnnnnnnnnnnnnnnnnnnnnnnnnnnnnnnnnnnnnnnnnnnnnnnnnnnnnnnnnnnnnnnnnnnnnnnnnnnnnnnnnnnnnnnnnnnnnnnnnnnnnnnnnnnnnnnnnnnnnnnnnnnnnnnnnnnnnnnnnnnnnnnnnnnnnnnnnnnnnnnnnnnnnnnnnnnnnnnnnnnnnnnnnnnnnnnnnnnnnnnnnnnnnnnnnnnnnnnnnnnnnnnnnnnnnnnnnnnnnnnnnnnnnnnnnnnnnnnnnnnnnnnnnnnnnnnnnnnnnnnnnnnnnnnnnnnnnnnnnnnnnnnnnnnnnnnnnnnnnnnnnnnnnnnnnnnnnnnnnnnnnnnnnnnnnnnnnnnnnnnnnnnnnnnnnnnnnnnnnnnnnnnnnnnnnnnnnnnnnnnnnnnnnnnnnnnnnnnnnnnnnnnnnnnnnnnnnnnnnnnnnnnnnnnnnnnnnnnnnnnnnnnnnnnnnnnnnnnnnnnnnnnnnnnnnnnnnnnnnnnnnnnnnnnnnnnnnnnnnnnnnnnnnnnnnnnnnnnnnnnnnnnnnnnnnnnnnnnnnnnnnnnnnnnnnnnnnnnnnnnnnnnnnnnnnnnnnnnnnnnnnnnnnnnnnnnnnnnnnnnnnnnnnnnnnnnnnnnnnnnnnnnnnnnnnnnnnnnnnnnnnnnnnnnnnnnnnnnnnnnnnnnnnnnnnnnnnnnnnnnnnnnnnnnnnnnnnnnnnnnnnnnnnnnnnnnnnnnnnnnnnnnnnnnnnnnnnnnnnnnnnnnnnnnnnnnnnnnnnnnnnnnnnnnnnnnnnnnnnnnnnnnnnnnnnnnnnnnnnnnnnnnnnnnnnnnnnnnnnnnnnnnnnnnnnnnnnnnnnnnnnnnnnnnnnnnnnnnnnnnnnnnnnnnnnnnnnnnnnnnnnnnnnnnnnnnnnnnnnnnnnnnnnnnnnnnnnnnnnnnnnnnnnnnnnnnnnnnnnnnnnnnnnnnnnnnnnnnnnnnnnnnnnnnnnnnnnnnnnnnnnnnnnnnnnnnnnnnnnnnnnnnnnnnnnnnnnnnnnnnnnnnnnnnnnnnnnnnnnnnnnnnnnnnnnnnnnnnnnnnnnnnnnnnnnnnnnnnnnnnnnnnnnnnnnnnnnnnnnnnnnnnnnnnnnnnnnnnnnnnnnnnnnnnnnnnnnnnnnnnnnnnnnnnnnnnnnnnnnnnnnnnnnnnnnnnnnnnnnnnnnnnnnnnnnnnnnnnnnnnnnnnnnnnnnnnnnnnnnnnnnnnnnnnnnnnnnnnnnnnnnnnnnnnnnnnnnnnnnnnnnnnnnnnnnnnnnnnnnnnnnnnnnnnnnnnnnnnnnnnnnnnnnnnnnnnnnnnnnnnnnnnnnnnnnnnnnnnnnnnnnnnnnnnnnnnnnnnnnnnnnnnnnnnnnnnnnnnnnnnnnnnnnnnnnnnnnnnnnnnnnnnnnnnnnnnnnnnnnnnnnnnnnnnnnnnnnnnnnnnnnnnnnnnnnnnnnnnnnnnnnnnnnnnnnnnnnnnnnnnnnnnnnnnnnnnnnnnnnnnnnnnnnnnnnnnnnnnnnnnnnnnnnnnnnnnnnnnnnnnnnnnnnnnnnnnnnnnnnnnnnnnnnnnnnnnnnnnnnnnnnnnnnnnnnnnnnnnnnnnnnnnnnnnnnnnnnnnnnnnnnnnnnnnnnnnnnnnnnnnnnnnnnnnnnnnnnnnnnnnnnnnnnnnnnnnnnnnnnnnnnnnnnnnnnnnnnnnnnnnnnnnnnnnnnnnnnnnnnnnnnnnnnnnnnnnnnnnnnnnnnnnnnnnnnnnnnnnnnnnnnnnnnnnnnnnnnnnnnnnnnnnnnnnnnnnnnnnnnnnnnnnnnnnnnnnnnnnnnnnnnnnnnnnnnnnnnnnnnnnnnnnnnnnnnnnnnnnnnnnnnnnnnnnnnnnnnnnnnnnnnnnnnnnnnnnnnnnnnnnnnnnnnnnnnnnnnnnnnnnnnnnnnnnnnnnnnnnnnnnnnnnnnnnnnnnnnnnnnnnnnnnnnnnnnnnnnnnnnnnnnnnnnnnnnnnnnnnnnnnnnnnnnnnnnnnnnnnnnnnnnnnnnnnnnnnnnnnnnnnnnnnnnnnnnnnnnnnnnnnnnnnnnnnnnnnnnnnnnnnnnnnnnnnnnnnnnnnnnnnnnnnnnnnnnnnnnnnnnnnnnnnnnnnnnnnnnnnnnnnnnnnnnnnnnnnnnnnnnnnnnnnnnnnnnnnnnnnnnnnnnnnnnnnnnnnnnnnnnnnnnnnnnnnnnnnnnnnnnnnnnnnnnnnnnnnnnnnnnnnnnnnnnnnnnnnnnnnnnnnnnnnnnnnnnnnnnnnnnnnnnnnnnnnnnnnnnnnnnnnnnnnnnnnnnnnnnnnnnnnnnnnnnnnnnnnnnnnnnnnnnnnnnnnnnnnnnnnnnnnnnnnnnnnnnnnnnnnnnnnnnnnnnnnnnnnnnnnnnnnnnnnnnnnnnnnnnnnnnnnnnnnnnnnnnnnnnnnnnnnnnnnnnnnnnnnnnnnnnnnnnnnnnnnnnnnnnnnnnnnnnnnnnnnnnnnnnnnnnnnnnnnnnnnnnnnnnnnnnnnnnnnnnnnnnnnnnnnnnnnnnnnnnnnnnnnnnnnnnnnnnnnnnnnnnnnnnnnnnnnnnnnnnnnnnnnnnnnnnnnnnnnnnnnnnnnnnnnnnnnnnnnnnnnnnnnnnnnnnnnnnnnnnnnnnnnnnnnnnnnnnnnnnnnnnnnnnnnnnnnnnnnnnnnnnnnnnnnnnnnnnnnnnnnnnnnnnnnnnnnnnnnnnnnnnnnnnnnnnnnnnnnnnnnnnnnnnnnnnnnnnnnnnnnnnnnnnnnnnnnnnnnnnnnnnnnnnnnnnnnnnnnnnnnnnnnnnnnnnnnnnnnnnnnnnnnnnnnnnnnnnnnnnnnnnnnnnnnnnnnnnnnnnnnnnnnnnnnnnnnnnnnnnnnnnnnnnnnnnnnnnnnnnnnnnnnnnnnnnnnnnnnnnnnnnnnnnnnnnnnnnnnnnnnnnnnnnnnnnnnnnnnnnnnnnnnnnnnnnnnnnnnnnnnnnnnnnnnnnnnnnnnnnnnnnnnnnnnnnnnnnnnnnnnnnnnnnnnnnnnnnnnnnnnnnnnnnnnnnnnnnnnnnnnnnnnnnnnnnnnnnnnnnnnnnnnnnnnnnnnnnnnnnnnnnnnnnnnnnnnnnnnnnnnnnnnnnnnnnnnnnnnnnnnnnnnnnnnnnnnnnnnnnnnnnnnnnnnnnnnnnnnnnnnnnnnnnnnnnnnnnnnnnnnnnnnnnnnnnnnnnnnnnnnnnnnnnnnnnnnnnnnnnnnnnnnnnnnnnnnnnnnnnnnnnnnnnnnnnnnnnnnnnnnnnnnnnnnnnnnnnnnnnnnnnnnnnnnnnnnnnnnnnnnnnnnnnnnnnnnnnnnnnnnnnnnnnnnnnnnnnnnnnnnnnnnnnnnnnnnnnnnnnnnnnnnnnnnnnnnnnnnnnnnnnnnnnnnnnnnnnnnnnnnnnnnnnnnnnnnnnnnnnnnnnnnnnnnnnnnnnnnnnnnnnnnnnnnnnnnnnnnnnnnnnnnnnnnnnnnnnnnnnnnnnnnnnnnnnnnnnnnnnnnnnnnnnnnnnnnnnnnnnnnnnnnnnnnnnnnnnnnnnnnnnnnnnnnnnnnnnnnnnnnnnnnnnnnnnnnnnnnnnnnnnnnnnnnnnnnnnnnnnnnnnnnnnnnnnnnnnnnnnnnnnnnnnnnnnnnnnnnnnnnnnnnnnnnnnnnnnnnnnnnnnnnnnnnnnnnnnnnnnnnnnnnnnnnnnnnnnnnnnnnnnnnnnnnnnnnnnnnnnnnnnnnnnnnnnnnnnnnnnnnnnnnnnnnnnnnnnnnnnnnnnnnnnnnnnnnnnnnnnnnnnnnnnnnnnnnnnnnnnnnnnnnnnnnnnnnnnnnnnnnnnnnnnnnnnnnnnnnnnnnnnnnnnnnnnnnnnnnnnnnnnnnnnnnnnnnnnnnnnnnnnnnnnnnnnnnnnnnnnnnnnnnnnnnnnnnnnnnnnnnnnnnnnnnnnnnnnnnnnnnnnnnnnnnnnnnnnnnnnnnnnnnnnnnnnnnnnnnnnnnnnnnnnnnnnnnnnnnnnnnnnnnnnnnnnnnnnnnnnnnnnnnnnnnnnnnnnnnnnnnnnnnnnnnnnnnnnnnnnnnnnnnnnnnnnnnnnnnnnnnnnnnnnnnnnnnnnnnnnnnnnnnnnnnnnnnnnnnnnnnnnnnnnnnnnnnnnnnnnnnnnnnnnnnnnnnnnnnnnnnnnnnnnnnnnnnnnnnnnnnnnnnnnnnnnnnnnnnnnnnnnnnnnnnnnnnnnnnnnnnnnnnnnnnnnnnnnnnnnnnnnnnnnnnnnnnnnnnnnnnnnnnnnnnnnnnnnnnnnnnnnnnnnnnnnnnnnnnnnnnnnnnnnnnnnnnnnnnnnnnnnnnnnnnnnnnnnnnnnnnnnnnnnnnnnnnnnnnnnnnnnnnnnnnnnnnnnnnnnnnnnnnnnnnnnnnnnnnnnnnnnnnnnnnnnnnnnnnnnnnnnnnnnnnnnnnnnnnnnnnnnnnnnnnnnnnnnnnnnnnnnnnnnnnnnnnnnnnnnnnnnnnnnnnnnnnnnnnnnnnnnnnnnnnnnnnnnnnnnnnnnnnnnnnnnnnnnnnnnnnnnnnnnnnnnnnnnnnnnnnnnnnnnnnnnnnnnnnnnnnnnnnnnnnnnnnnnnnnnnnnnnnnnnnnnnnnnnnnnnnnnnnnnnnnnnnnnnnnnnnnnnnnnnnnnnnnnnnnnnnnnnnnnnnnnnnnnnnnnnnnnnnnnnnnnnnnnnnnnnnnnnnnnnnnnnnnnnnnnnnnnnnnnnnnnnnnnnnnnnnnnnnnnnnnnnnnnnnnnnnnnnnnnnnnnnnnnnnnnnnnnnnnnnnnnnnnnnnnnnnnnnnnnnnnnnnnnnnnnnnnnnnnnnnnnnnnnnnnnnnnnnnnnnnnnnnnnnnnnnnnnnnnnnnnnnnnnnnnnnnnnnnnnnnnnnnnnnnnnnnnnnnnnnnnnnnnnnnnnnnnnnnnnnnnnnnnnnnnnnnnnnnnnnnnnnnnnnnnnnnnnnnnnnnnnnnnnnnnnnnnnnnnnnnnnnnnnnnnnnnnnnnnnnnnnnnnnnnnnnnnnnnnnnnnnnnnnnnnnnnnnnnnnnnnnnnnnnnnnnnnnnnnnnnnnnnnnnnnnnnnnnnnnnnnnnnnnnnnnnnnnnnnnnnnnnnnnnnnnnnnnnnnnnnnnnnnnnnnnnnnnnnnnnnnnnnnnnnnnnnnnnnnnnnnnnnnnnnnnnnnnnnnnnnnnnnnnnnnnnnnnnnnnnnnnnnnnnnnnnnnnnnnnnnnnnnnnnnnnnnnnnnnnnnnnnnnnnnnnnnnnnnnnnnnnnnnnnnnnnnnnnnnnnnnnnnnnnnnnnnnnnnnnnnnnnnnnnnnnnnnnnnnnnnnnnnnnnnnnnnnnnnnnnnnnnnnnnnnnnnnnnnnnnnnnnnnnnnnnnnnnnnnnnnnnnnnnnnnnnnnnnnnnnnnnnnnnnnnnnnnnnnnnnnnnnnnnnnnnnnnnnnnnnnnnnnnnnnnnnnnnnnnnnnnnnnnnnnnnnnnnnnnnnnnnnnnnnnnnnnnnnnnnnnnnnnnnnnnnnnnnnnnnnnnnnnnnnnnnnnnnnnnnnnnnnnnnnnnnnnnnnnnnnnnnnnnnnnnnnnnnnnnnnnnnnnnnnnnnnnnnnnnnnnnnnnnnnnnnnnnnnnnnnnnnnnnnnnnnnnnnnnnnnnnnnnnnnnnnnnnnnnnnnnnnnnnnnnnnnnnnnnnnnnnnnnnnnnnnnnnnnnnnnnnnnnnnnnnnnnnnnnnnnnnnnnnnnnnnnnnnnnnnnnnnnnnnnnnnnnnnnnnnnnnnnnnnnnnnnnnnnnnnnnnnnnnnnnnnnnnnnnnnnnnnnnnnnnnnnnnnnnnnnnnnnnnnnnnnnnnnnnnnnnnnnnnnnnnnnnnnnnnnnnnnnnnnnnnnnnnnnnnnnnnnnnnnnnnnnnnnnnnnnnnnnnnnnnnnnnnnnnnnnnnnnnnnnnnnnnnnnnnnnnnnnnnnnnnnnnnnnnnnnnnnnnnnnnnnnnnnnnnnnnnnnnnnnnnnnnnnnnnnnnnnnnnnnnnnnnnnnnnnnnnnnnnnnnnnnnnnnnnnnnnnnnnnnnnnnnnnnnnnnnnnnnnnnnnnnnnnnnnnnnnnnnnnnnnnnnnnnnnnnnnnnnnnnnnnnnnnnnnnnnnnnnnnnnnnnnnnnnnnnnnnnnnnnnnnnnnnnnnnnnnnnnnnnnnnnnnnnnnnnnnnnnnnnnnnnnnnnnnnnnnnnnnnnnnnnnnnnnnnnnnnnnnnnnnnnnnnnnnnnnnnnnnnnnnnnnnnnnnnnnnnnnnnnnnnnnnnnnnnnnnnnnnnnnnnnnnnnnnnnnnnnnnnnnnnnnnnnnnnnnnnnnnnnnnnnnnnnnnnnnnnnnnnnnnnnnnnnnnnnnnnnnnnnnnnnnnnnnnnnnnnnnnnnnnnnnnnnnnnnnnnnnnnnnnnnnnnnnnnnnnnnnnnnnnnnnnnnnnnnnnnnnnnnnnnnnnnnnnnnnnnnnnnnnnnnnnnnnnnnnnnnnnnnnnnnnnnnnnnnnnnnnnnnnnnnnnnnnnnnnnnnnnnnnnnnnnnnnnnnnnnnnnnnnnnnnnnnnnnnnnnnnnnnnnnnnnnnnnnnnnnnnnnnnnnnnnnnnnnnnnnnnnnnnnnnnnnnnnnnnnnnnnnnnnnnnnnnnnnnnnnnnnnnnnnnnnnnnnnnnnnnnnnnnnnnnnnnnnnnnnnnnnnnnnnnnnnnnnnnnnnnnnnnnnnnnnnnnnnnnnnnnnnnnnnnnnnnnnnnnnnnnnnnnnnnnnnnnnnnnnnnnnnnnnnnnnnnnnnnnnnnnnnnnnnnnnnnnnnnnnnnnnnnnnnnnnnnnnnnnnnnnnnnnnnnnnnnnnnnnnnnnnnnnnnnnnnnnnnnnnnnnnnnnnnnnnnnnnnnnnnnnnnnnnnnnnnnnnnnnnnnnnnnnnnnnnnnnnnnnnnnnnnnnnnnnnnnnnnnnnnnnnnnnnnnnnnnnnnnnnnnnnnnnnnnnnnnnnnnnnnnnnnnnnnnnnnnnnnnnnnnnnnnnnnnnnnnnnnnnnnnnnnnnnnnnnnnnnnnnnnnnnnnnnnnnnnnnnnnnnnnnnnnnnnnnnnnnnnnnnnnnnnnnnnnnnnnnnnnnnnnnnnnnnnnnnnnnnnnnnnnnnnnnnnnnnnnnnnnnnnnnnnnnnnnnnnnnnnnnnnnnnnnnnnnnnnnnnnnnnnnnnnnnnnnnnnnnnnnnnnnnnnnnnnnnnnnnnnnnnnnnnnnnnnnnnnnnnnnnnnnnnnnnnnnnnnnnnnnnnnnnnnnnnnnnnnnnnnnnnnnnnnnnnnnnnnnnnnnnnnnnnnnnnnnnnnnnnnnnnnnnnnnnnnnnnnnnnnnnnnnnnnnnnnnnnnnnnnnnnnnnnnnnnnnnnnnnnnnnnnnnnnnnnnnnnnnnnnnnnnnnnnnnnnnnnnnnnnnnnnnnnnnnnnnnnnnnnnnnnnnnnnnnnnnnnnnnnnnnnnnnnnnnnnnnnnnnnnnnnnnnnnnnnnnnnnnnnnnnnnnnnnnnnnnnnnnnnnnnnnnnnnnnnnnnnnnnnnnnnnnnnnnnnnnnnnnnnnnnnnnnnnnnnnnnnnnnnnnnnnnnnnnnnnnnnnnnnnnnnnnnnnnnnnnnnnnnnnnnnnnnnnnnnnnnnnnnnnnnnnnnnnnnnnnnnnnnnnnnnnnnnnnnnnnnnnnnnnnnnnnnnnnnnnnnnnnnnnnnnnnnnnnnnnnnnnnnnnnnnnnnnnnnnnnnnnnnnnnnnnnnnnnnnnnnnnnnnnnnnnnnnnnnnnnnnnnnnnnnnnnnnnnnnnnnnnnnnnnnnnnnnnnnnnnnnnnnnnnnnnnnnnnnnnnnnnnnnnnnnnnnnnnnnnnnnnnnnnnnnnnnnnnnnnnnnnnnnnnnnnnnnnnnnnnnnnnnnnnnnnnnnnnnnnnnnnnnnnnnnnnnnnnnnnnnnnnnnnnnnnnnnnnnnnnnnnnnnnnnnnnnnnnnnnnnnnnnnnnnnnnnnnnnnnnnnnnnnnnnnnnnnnnnnnnnnnnnnnnnnnnnnnnnnnnnnnnnnnnnnnnnnnnnnnnnnnnnnnnnnnnnnnnnnnnnnnnnnnnnnnnnnnnnnnnnnnnnnnnnnnnnnnnnnnnnnnnnnnnnnnnnnnnnnnnnnnnnnnnnnnnnnnnnnnnnnnnnnnnnnnnnnnnnnnnnnnnnnnnnnnnnnnnnnnnnnnnnnnnnnnnnnnnnnnnnnnnnnnnnnnnnnnnnnnnnnnnnnnnnnnnnnnnnnnnnnnnnnnnnnnnnnnnnnnnnnnnnnnnnnnnnnnnnnnnnnnnnnnnnnnnnnnnnnnnnnnnnnnnnnnnnnnnnnnnnnnnnnnnnnnnnnnnnnnnnnnnnnnnnnnnnnnnnnnnnnnnnnnnnnnnnnnnnnnnnnnnnnnnnnnnnnnnnnnnnnnnnnnnnnnnnnnnnnnnnnnnnnnnnnnnnnnnnnnnnnnnnnnnnnnnnnnnnnnnnnnnnnnnnnnnnnnnnnnnnnnnnnnnnnnnnnnnnnnnnnnnnnnnnnnnnnnnnnnnnnnnnnnnnnnnnnnnnnnnnnnnnnnnnnnnnnnnnnnnnnnnnnnnnnnnnnnnnnnnnnnnnnnnnnnnnnnnnnnnnnnnnnnnnnnnnnnnnnnnnnnnnnnnnnnnnnnnnnnnnnnnnnnnnnnnnnnnnnnnnnnnnnnnnnnnnnnnnnnnnnnnnnnnnnnnnnnnnnnnnnnnnnnnnnnnnnnnnnnnnnnnnnnnnnnnnnnnnnnnnnnnnnnnnnnnnnnnnnnnnnnnnnnnnnnnnnnnnnnnnnnnnnnnnnnnnnnnnnnnnnnnnnnnnnnnnnnnnnnnnnnnnnnnnnnnnnnnnnnnnnnnnnnnnnnnnnnnnnnnnnnnnnnnnnnnnnnnnnnnnnnnnnnnnnnnnnnnnnnnnnnnnnnnnnnnnnnnnnnnnnnnnnnnnnnnnnnnnnnnnnnnnnnnnnnnnnnnnnnnnnnnnnnnnnnnnnnnnnnnnnnnnnnnnnnnnnnnnnnnnnnnnnnnnnnnnnnnnnnnnnnnnnnnnnnnnnnnnnnnnnnnnnnnnnnnnnnnnnnnnnnnnnnnnnnnnnnnnnnnnnnnnnnnnnnnnnnnnnnnnnnnnnnnnnnnnnnnnnnnnnnnnnnnnnnnnnnnnnnnnnnnnnnnnnnnnnnnnnnnnnnnnnnnnnnnnnnnnnnnnnnnnnnnnnnnnnnnnnnnnnnnnnnnnnnnnnnnnnnnnnnnnnnnnnnnnnnnnnnnnnnnnnnnnnnnnnnnnnnnnnnnnnnnnnnnnnnnnnnnnnnnnnnnnnnnnnnnnnnnnnnnnnnnnnnnnnnnnnnnnnnnnnnnnnnnnnnnnnnnnnnnnnnnnnnnnnnnnnnnnnnnnnnnnnnnnnnnnnnnnnnnnnnnnnnnnnnnnnnnnnnnnnnnnnnnnnnnnnnnnnnnnnnnnnnnnnnnnnnnnnnnnnnnnnnnnnnnnnnnnnnnnnnnnnnnnnnnnnnnnnnnnnnnnnnnnnnnnnnnnnnnnnnnnnnnnnnnnnnnnnnnnnnnnnnnnnnnnnnnnnnnnnnnnnnnnnnnnnnnnnnnnnnnnnnnnnnnnnnnnnnnnnnnnnnnnnnnnnnnnnnnnnnnnnnnnnnnnnnnnnnnnnnnnnnnnnnnnnnnnnnnnnnnnnnnnnnnnnnnnnnnnnnnnnnnnnnnnnnnnnnnnnnnnnnnnnnnnnnnnnnnnnnnnnnnnnnnnnnnnnnnnnnnnnnnnnnnnnnnnnnnnnnnnnnnnnnnnnnnnnnnnnnnnnnnnnnnnnnnnnnnnnnnnnnnnnnnnnnnnnnnnnnnnnnnnnnnnnnnnnnnnnnnnnnnnnnnnnnnnnnnnnnnnnnnnnnnnnnnnnnnnnnnnnnnnnnnnnnnnnnnnnnnnnnnnnnnnnnnnnnnnnnnnnnnnnnnnnnnnnnnnnnnnnnnnnnnnnnnnnnnnnnnnnnnnnnnnnnnnnnnnnnnnnnnnnnnnnnnnnnnnnnnnnnnnnnnnnnnnnnnnnnnnnnnnnnnnnnnnnnnnnnnnnnnnnnnnnnnnnnnnnnnnnnnnnnnnnnnnnnnnnnnnnnnnnnnnnnnnnnnnnnnnnnnnnnnnnnnnnnnnnnnnnnnnnnnnnnnnnnnnnnnnnnnnnnnnnnnnnnnnnnnnnnnnnnnnnnnnnnnnnnnnnnnnnnnnnnnnnnnnnnnnnnnnnnnnnnnnnnnnnnnnnnnnnnnnnnnnnnnnnnnnnnnnnnnnnnnnnnnnnnnnnnnnnnnnnnnnnnnnnnnnnnnnnnnnnnnnnnnnnnnnnnnnnnnnnnnnnnnnnnnnnnnnnnnnnnnnnnnnnnnnnnnnnnnnnnnnnnnnnnnnnnnnnnnnnnnnnnnnnnnnnnnnnnnnnnnnnnnnnnnnnnnnnnnnnnnnnnnnnnnnnnnnnnnnnnnnnnnnnnnnnnnnnnnnnnnnnnnnnnnnnnnnnnnnnnnnnnnnnnnnnnnnnnnnnnnnnnnnnnnnnnnnnnnnnnnnnnnnnnnnnnnnnnnnnnnnnnnnnnnnnnnnnnnnnnnnnnnnnnnnnnnnnnnnnnnnnnnnnnnnnnnnnnnnnnnnnnnnnnnnnnnnnnnnnnnnnnnnnnnnnnnnnnnnnnnnnnnnnnnnnnnnnnnnnnnnnnnnnnnnnnnnnnnnnnnnnnnnnnnnnnnnnnnnnnnnnnnnnnnnnnnnnnnnnnnnnnnnnnnnnnnnnnnnnnnnnnnnnnnnnnnnnnnnnnnnnnnnnnnnnnnnnnnnnnnnnnnnnnnnnnnnnnnnnnnnnnnnnnnnnnnnnnnnnnnnnnnnnnnnnnnnnnnnnnnnnnnnnnnnnnnnnnnnnnnnnnnnnnnnnnnnnnnnnnnnnnnnnnnnnnnnnnnnnnnnnnnnnnnnnnnnnnnnnnnnnnnnnnnnnnnnnnnnnnnnnnnnnnnnnnnnnnnnnnnnnnnnnnnnnnnnnnnnnnnnnnnnnnnnnnnnnnnnnnnnnnnnnnnnnnnnnnnnnnnnnnnnnnnnnnnnnnnnnnnnnnnnnnnnnnnnnnnnnnnnnnnnnnnnnnnnnnnnnnnnnnnnnnnnnnnnnnnnnnnnnnnnnnnnnnnnnnnnnnnnnnnnnnnnnnnnnnnnnnnnnnnnnnnnnnnnnnnnnnnnnnnnnnnnnnnnnnnnnnnnnnnnnnnnnnnnnnnnnnnnnnnnnnnnnnnnnnnnnnnnnnnnnnnnnnnnnnnnnnnnnnnnnnnnnnnnnnnnnnnnnnnnnnnnnnnnnnnnnnnnnnnnnnnnnnnnnnnnnnnnnnnnnnnnnnnnnnnnnnnnnnnnnnnnnnnnnnnnnnnnnnnnnnnnnnnnnnnnnnnnnnnnnnnnnnnnnnnnnnnnnnnnnnnnnnnnnnnnnnnnnnnnnnnnnnnnnnnnnnnnnnnnnnnnnnnnnnnnnnnnnnnnnnnnnnnnnnnnnnnnnnnnnnnnnnnnnnnnnnnnnnnnnnnnnnnnnnnnnnnnnnnnnnnnnnnnnnnnnnnnnnnnnnnnnnnnnnnnnnnnnnnnnnnnnnnnnnnnnnnnnnnnnnnnnnnnnnnnnnnnnnnnnnnnnnnnnnnnnnnnnnnnnnnnnnnnnnnnnnnnnnnnnnnnnnnnnnnnnnnnnnnnnnnnnnnnnnnnnnnnnnnnnnnnnnnnnnnnnnnnnnnnnnnnnnnnnnnnnnnnnnnnnnnnnnnnnnnnnnnnnnnnnnnnnnnnnnnnnnnnnnnnnnnnnnnnnnnnnnnnnnnnnnnnnnnnnnnnnnnnnnnnnnnnnnnnnnnnnnnnnnnnnnnnnnnnnnnnnnnnnnnnnnnnnnnnnnnnnnnnnnnnnnnnnnnnnnnnnnnnnnnnnnnnnnnnnnnnnnnnnnnnnnnnnnnnnnnnnnnnnnnnnnnnnnnnnnnnnnnnnnnnnnnnnnnnnnnnnnnnnnnnnnnnnnnnnnnnnnnnnnnnnnnnnnnnnnnnnnnnnnnnnnnnnnnnnnnnnnnnnnnnnnnnnnnnnnnnnnnnnnnnnnnnnnnnnnnnnnnnnnnnnnnnnnnnnnnnnnnnnnnnnnnnnnnnnnnnnnnnnnnnnnnnnnnnnnnnnnnnnnnnnnnnnnnnnnnnnnnnnnnnnnnnnnnnnnnnnnnnnnnnnnnnnnnnnnnnnnnnnnnnnnnnnnnnnnnnnnnnnnnnnnnnnnnnnnnnnnnnnnnnnnnnnnnnnnnnnnnnnnnnnnnnnnnnnnnnnnnnnnnnnnnnnnnnnnnnnnnnnnnnnnnnnnnnnnnnnnnnnnnnnnnnnnnnnnnnnnnnnnnnnnnnnnnnnnnnnnnnnnnnnnnnnnnnnnnnnnnnnnnnnnnnnnnnnnnnnnnnnnnnnnnnnnnnnnnnnnnnnnnnnnnnnnnnnnnnnnnnnnnnnnnnnnnnnnnnnnnnnnnnnnnnnnnnnnnnnnnnnnnnnnnnnnnnnnnnnnnnnnnnnnnnnnnnnnnnnnnnnnnnnnnnnnnnnnnnnnnnnnnnnnnnnnnnnnnnnnnnnnnnnnnnnnnnnnnnnnnnnnnnnnnnnnnnnnnnnnnnnnnnnnnnnnnnnnnnnnnnnnnnnnnnnnnnnnnnnnnnnnnnnnnnnnnnnnnnnnnnnnnnnnnnnnnnnnnnnnnnnnnnnnnnnnnnnnnnnnnnnnnnnnnnnnnnnnnnnnnnnnnnnnnnnnnnnnnnnnnnnnnnnnnnnnnnnnnnnnnnnnnnnnnnnnnnnnnnnnnnnnnnnnnnnnnnnnnnnnnnnnnnnnnnnnnnnnnnnnnnnnnnnnnnnnnnnnnnnnnnnnnnnnnnnnnnnnnnnnnnnnnnnnnnnnnnnnnnnnnnnnnnnnnnnnnnnnnnnnnnnnnnnnnnnnnnnnnnnnnnnnnnnnnnnnnnnnnnnnnnnnnnnnnnnnnnnnnnnnnnnnnnnnnnnnnnnnnnnnnnnnnnnnnnnnnnnnnnnnnnnnnnnnnnnnnnnnnnnnnnnnnnnnnnnnnnnnnnnnnnnnnnnnnnnnnnnnnnnnnnnnnnnnnnnnnnnnnnnnnnnnnnnnnnnnnnnnnnnnnnnnnnnnnnnnnnnnnnnnnnnnnnnnnnnnnnnnnnnnnnnnnnnnnnnnnnnnnnnnnnnnnnnnnnnnnnnnnnnnnnnnnnnnnnnnnnnnnnnnnnnnnnnnnnnnnnnnnnnnnnnnnnnnnnnnnnnnnnnnnnnnnnnnnnnnnnnnnnnnnnnnnnnnnnnnnnnnnnnnnnnnnnnnnnnnnnnnnnnnnnnnnnnnnnnnnnnnnnnnnnnnnnnnnnnnnnnnnnnnnnnnnnnnnnnnnnnnnnnnnnnnnnnnnnnnnnnnnnnnnnnnnnnnnnnnnnnnnnnnnnnnnnnnnnnnnnnnnnnnnnnnnnnnnnnnnnnnnnnnnnnnnnnnnnnnnnnnnnnnnnnnnnnnnnnnnnnnnnnnnnnnnnnnnnnnnnnnnnnnnnnnnnnnnnnnnnnnnnnnnnnnnnnnnnnnnnnnnnnnnnnnnnnnnnnnnnnnnnnnnnnnnnnnnnnnnnnnnnnnnnnnnnnnnnnnnnnnnnnnnnnnnnnnnnnnnnnnnnnnnnnnnnnnnnnnnnnnnnnnnnnnnnnnnnnnnnnnnnnnnnnnnnnnnnnnnnnnnnnnnnnnnnnnnnnnnnnnnnnnnnnnnnnnnnnnnnnnnnnnnnnnnnnnnnnnnnnnnnnnnnnnnnnnnnnnnnnnnnnnnnnnnnnnnnnnnnnnnnnnnnnnnnnnnnnnnnnnnnnnnnnnnnnnnnnnnnnnnnnnnnnnnnnnnnnnnnnnnnnnnnnnnnnnnnnnnnnnnnnnnnnnnnnnnnnnnnnnnnnnnnnnnnnnnnnnnnnnnnnnnnnnnnnnnnnnnnnnnnnnnnnnnnnnnnnnnnnnnnnnnnnnnnnnnnnnnnnnnnnnnnnnnnnnnnnnnnnnnnnnnnnnnnnnnnnnnnnnnnnnnnnnnnnnnnnnnnnnnnnnnnnnnnnnnnnnnnnnnnnnnnnnnnnnnnnnnnnnnnnnnnnnnnnnnnnnnnnnnnnnnnnnnnnnnnnnnnnnnnnnnnnnnnnnnnnnnnnnnnnnnnnnnnnnnnnnnnnnnnnnnnnnnnnnnnnnnnnnnnnnnnnnnnnnnnnnnnnnnnnnnnnnnnnnnnnnnnnnnnnnnnnnnnnnnnnnnnnnnnnnnnnnnnnnnnnnnnnnnnnnnnnnnnnnnnnnnnnnnnnnnnnnnnnnnnnnnnnnnnnnnnnnnnnnnnnnnnnnnnnnnnnnnnnnnnnnnnnnnnnnnnnnnnnnnnnnnnnnnnnnnnnnnnnnnnnnnnnnnnnnnnnnnnnnnnnnnnnnnnnnnnnnnnnnnnnnnnnnnnnnnnnnnnnnnnnnnnnnnnnnnnnnnnnnnnnnnnnnnnnnnnnnnnnnnnnnnnnnnnnnnnnnnnnnnnnnnnnnnnnnnnnnnnnnnnnnnnnnnnnnnnnnnnnnnnnnnnnnnnnnnnnnnnnnnnnnnnnnnnnnnnnnnnnnnnnnnnnnnnnnnnnnnnnnnnnnnnnnnnnnnnnnnnnnnnnnnnnnnnnnnnnnnnnnnnnnnnnnnnnnnnnnnnnnnnnnnnnnnnnnnnnnnnnnnnnnnnnnnnnnnnnnnnnnnnnnnnnnnnnnnnnnnnnnnnnnnnnnnnnnnnnnnnnnnnnnnnnnnnnnnnnnnnnnnnnnnnnnnnnnnnnnnnnnnnnnnnnnnnnnnnnnnnnnnnnnnnnnnnnnnnnnnnnnnnnnnnnnnnnnnnnnnnnnnnnnnnnnnnnnnnnnnnnnnnnnnnnnnnnnnnnnnnnnnnnnnnnnnnnnnnnnnnnnnnnnnnnnnnnnnnnnnnnnnnnnnnnnnnnnnnnnnnnnnnnnnnnnnnnnnnnnnnnnnnnnnnnnnnnnnnnnnnnnnnnnnnnnnnnnnnnnnnnnnnnnnnnnnnnnnnnnnnnnnnnnnnnnnnnnnnnnnnnnnnnnnnnnnnnnnnnnnnnnnnnnnnnnnnnnnnnnnnnnnnnnnnnnnnnnnnnnnnnnnnnnnnnnnnnnnnnnnnnnnnnnnnnnnnnnnnnnnnnnnnnnnnnnnnnnnnnnnnnnnnnnnnnnnnnnnnnnnnnnnnnnnnnnnnnnnnnnnnnnnnnnnnnnnnnnnnnnnnnnnnnnnnnnnnnnnnnnnnnnnnnnnnnnnnnnnnnnnnnnnnnnnnnnnnnnnnnnnnnnnnnnnnnnnnnnnnnnnnnnnnnnnnnnnnnnnnnnnnnnnnnnnnnnnnnnnnnnnnnnnnnnnnnnnnnnnnnnnnnnnnnnnnnnnnnnnnnnnnnnnnnnnnnnnnnnnnnnnnnnnnnnnnnnnnnnnnnnnnnnnnnnnnnnnnnnnnnnnnnnnnnnnnnnnnnnnnnnnnnnnnnnnnnnnnnnnnnnnnnnnnnnnnnnnnnnnnnnnnnnnnnnnnnnnnnnnnnnnnnnnnnnnnnnnnnnnnnnnnnnnnnnnnnnnnnnnnnnnnnnnnnnnnnnnnnnnnnnnnnnnnnnnnnnnnnnnnnnnnnnnnnnnnnnnnnnnnnnnnnnnnnnnnnnnnnnnnnnnnnnnnnnnnnnnnnnnnnnnnnnnnnnnnnnnnnnnnnnnnnnnnnnnnnnnnnnnnnnnnnnnnnnnnnnnnnnnnnnnnnnnnnnnnnnnnnnnnnnnnnnnnnnnnnnnnnnnnnnnnnnnnnnnnnnnnnnnnnnnnnnnnnnnnnnnnnnnnnnnnnnnnnnnnnnnnnnnnnnnnnnnnnnnnnnnnnnnnnnnnnnnnnnnnnnnnnnnnnnnnnnnnnnnnnnnnnnnnnnnnnnnnnnnnnnnnnnnnnnnnnnnnnnnnnnnnnnnnnnnnnnnnnnnnnnnnnnnnnnnnnnnnnnnnnnnnnnnnnnnnnnnnnnnnnnnnnnnnnnnnnnnnnnnnnnnnnnnnnnnnnnnnnnnnnnnnnnnnnnnnnnnnnnnnnnnnnnnnnnnnnnnnnnnnnnnnnnnnnnnnnnnnnnnnnnnnnnnnnnnnnnnnnnnnnnnnnnnnnnnnnnnnnnnnnnnnnnnnnnnnnnnnnnnnnnnnnnnnnnnnnnnnnnnnnnnnnnnnnnnnnnnnnnnnnnnnnnnnnnnnnnnnnnnnnnnnnnnnnnnnnnnnnnnnnnnnnnnnnnnnnnnnnnnnnnnnnnnnnnnnnnnnnnnnnnnnnnnnnnnnnnnnnnnnnnnnnnnnnnnnnnnnnnnnnnnnnnnnnnnnnnnnnnnnnnnnnnnnnnnnnnnnnnnnnnnnnnnnnnnnnnnnnnnnnnnnnnnnnnnnnnnnnnnnnnnnnnnnnnnnnnnnnnnnnnnnnnnnnnnnnnnnnnnnnnnnnnnnnnnnnnnnnnnnnnnnnnnnnnnnnnnnnnnnnnnnnnnnnnnnnnnnnnnnnnnnnnnnnnnnnnnnnnnnnnnnnnnnnnnnnnnnnnnnnnnnnnnnnnnnnnnnnnnnnnnnnnnnnnnnnnnnnnnnnnnnnnnnnnnnnnnnnnnnnnnnnnnnnnnnnnnnnnnnnnnnnnnnnnnnnnnnnnnnnnnnnnnnnnnnnnnnnnnnnnnnnnnnnnnnnnnnnnnnnnnnnnnnnnnnnnnnnnnnnnnnnnnnnnnnnnnnnnnnnnnnnnnnnnnnnnnnnnnnnnnnnnnnnnnnnnnnnnnnnnnnnnnnnnnnnnnnnnnnnnnnnnnnnnnnnnnnnnnnnnnnnnnnnnnnnnnnnnnnnnnnnnnnnnnnnnnnnnnnnnnnnnnnnnnnnnnnnnnnnnnnnnnnnnnnnnnnnnnnnnnnnnnnnnnnnnnnnnnnnnnnnnnnnnnnnnnnnnnnnnnnnnnnnnnnnnnnnnnnnnnnnnnnnnnnnnnnnnnnnnnnnnnnnnnnnnnnnnnnnnnnnnnnnnnnnnnnnnnnnnnnnnnnnnnnnnnnnnnnnnnnnnnnnnnnnnnnnnnnnnnnnnnnnnnnnnnnnnnnnnnnnnnnnnnnnnnnnnnnnnnnnnnnnnnnnnnnnnnnnnnnnnnnnnnnnnnnnnnnnnnnnnnnnnnnnnnnnnnnnnnnnnnnnnnnnnnnnnnnnnnnnnnnnnnnnnnnnnnnnnnnnnnnnnnnnnnnnnnnnnnnnnnnnnnnnnnnnnnnnnnnnnnnnnnnnnnnnnnnnnnnnnnnnnnnnnnnnnnnnnnnnnnnnnnnnnnnnnnnnnnnnnnnnnnnnnnnnnnnnnnnnnnnnnnnnnnnnnnnnnnnnnnnnnnnnnnnnnnnnnnnnnnnnnnnnnnnnnnnnnnnnnnnnnnnnnnnnnnnnnnnnnnnnnnnnnnnnnnnnnnnnnnnnnnnnnnnnnnnnnnnnnnnnnnnnnnnnnnnnnnnnnnnnnnnnnnnnnnnnnnnnnnnnnnnnnnnnnnnnnnnnnnnnnnnnnnnnnnnnnnnnnnnnnnnnnnnnnnnnnnnnnnnnnnnnnnnnnnnnnnnnnnnnnnnnnnnnnnnnnnnnnnnnnnnnnnnnnnnnnnnnnnnnnnnnnnnnnnnnnnnnnnnnnnnnnnnnnnnnnnnnnnnnnnnnnnnnnnnnnnnnnnnnnnnnnnnnnnnnnnnnnnnnnnnnnnnnnnnnnnnnnnnnnnnnnnnnnnnnnnnnnnnnnnnnnnnnnnnnnnnnnnnnnnnnnnnnnnnnnnnnnnnnnnnnnnnnnnnnnnnnnnnnnnnnnnnnnnnnnnnnnnnnnnnnnnnnnnnnnnnnnnnnnnnnnnnnnnnnnnnnnnnnnnnnnnnnnnnnnnnnnnnnnnnnnnnnnnnnnnnnnnnnnnnnnnnnnnnnnnnnnnnnnnnnnnnnnnnnnnnnnnnnnnnnnnnnnnnnnnnnnnnnnnnnnnnnnnnnnnnnnnnnnnnnnnnnnnnnnnnnnnnnnnnnnnnnnnnnnnnnnnnnnnnnnnnnnnnnnnnnnnnnnnnnnnnnnnnnnnnnnnnnnnnnnnnnnnnnnnnnnnnnnnnnnnnnnnnnnnnnnnnnnnnnnnnnnnnnnnnnnnnnnnnnnnnnnnnnnnnnnnnnnnnnnnnnnnnnnnnnnnnnnnnnnnnnnnnnnnnnnnnnnnnnnnnnnnnnnnnnnnnnnnnnnnnnnnnnnnnnnnnnnnnnnnnnnnnnnnnnnnnnnnnnnnnnnnnnnnnnnnnnnnnnnnnnnnnnnnnnnnnnnnnnnnnnnnnnnnnnnnnnnnnnnnnnnnnnnnnnnnnnnnnnnnnnnnnnnnnnnnnnnnnnnnnnnnnnnnnnnnnnnnnnnnnnnnnnnnnnnnnnnnnnnnnnnnnnnnnnnnnnnnnnnnnnnnnnnnnnnnnnnnnnnnnnnnnnnnnnnnnnnnnnnnnnnnnnnnnnnnnnnnnnnnnnnnnnnnnnnnnnnnnnnnnnnnnnnnnnnnnnnnnnnnnnnnnnnnnnnnnnnnnnnnnnnnnnnnnnnnnnnnnnnnnnnnnnnnnnnnnnnnnnnnnnnnnnnnnnnnnnnnnnnnnnnnnnnnnnnnnnnnnnnnnnnnnnnnnnnnnnnnnnnnnnnnnnnnnnnnnnnnnnnnnnnnnnnnnnnnnnnnnnnnnnnnnnnnnnnnnnnnnnnnnnnnnnnnnnnnnnnnnnnnnnnnnnnnnnnnnnnnnnnnnnnnnnnnnnnnnnnnnnnnnnnnnnnnnnnnnnnnnnnnnnnnnnnnnnnnnnnnnnnnnnnnnnnnnnnnnnnnnnnnnnnnnnnnnnnnnnnnnnnnnnnnnnnnnnnnnnnnnnnnnnnnnnnnnnnnnnnnnnnnnnnnnnnnnnnnnnnnnnnnnnnnnnnnnnnnnnnnnnnnnnnnnnnnnnnnnnnnnnnnnnnnnnnnnnnnnnnnnnnnnnnnnnnnnnnnnnnnnnnnnnnnnnnnnnnnnnnnnnnnnnnnnnnnnnnnnnnnnnnnnnnnnnnnnnnnnnnnnnnnnnnnnnnnnnnnnnnnnnnnnnnnnnnnnnnnnnnnnnnnnnnnnnnnnnnnnnnnnnnnnnnnnnnnnnnnnnnnnnnnnnnnnnnnnnnnnnnnnnnnnnnnnnnnnnnnnnnnnnnnnnnnnnnnnnnnnnnnnnnnnnnnnnnnnnnnnnnnnnnnnnnnnnnnnnnnnnnnnnnnnnnnnnnnnnnnnnnnnnnnnnnnnnnnnnnnnnnnnnnnnnnnnnnnnnnnnnnnnnnnnnnnnnnnnnnnnnnnnnnnnnnnnnnnnnnnnnnnnnnnnnnnnnnnnnnnnnnnnnnnnnnnnnnnnnnnnnnnnnnnnnnnnnnnnnnnnnnnnnnnnnnnnnnnnnnnnnnnnnnnnnnnnnnnnnnnnnnnnnnnnnnnnnnnnnnnnnnnnnnnnnnnnnnnnnnnnnnnnnnnnnnnnnnnnnnnnnnnnnnnnnnnnnnnnnnnnnnnnnnnnnnnnnnnnnnnnnnnnnnnnnnnnnnnnnnnnnnnnnnnnnnnnnnnnnnnnnnnnnnnnnnnnnnnnnnnnnnnnnnnnnnnnnnnnnnnnnnnnnnnnnnnnnnnnnnnnnnnnnnnnnnnnnnnnnnnnnnnnnnnnnnnnnnnnnnnnnnnnnnnnnnnnnnnnnnnnnnnnnnnnnnnnnnnnnnnnnnnnnnnnnnnnnnnnnnnnnnnnnnnnnnnnnnnnnnnnnnnnnnnnnnnnnnnnnnnnnnnnnnnnnnnnnnnnnnnnnnnnnnnnnnnnnnnnnnnnnnnnnnnnnnnnnnnnnnnnnnnnnnnnnnnnnnnnnnnnnnnnnnnnnnnnnnnnnnnnnnnnnnnnnnnnnnnnnnnnnnnnnnnnnnnnnnnnnnnnnnnnnnnnnnnnnnnnnnnnnnnnnnnnnnnnnnnnnnnnnnnnnnnnnnnnnnnnnnnnnnnnnnnnnnnnnnnnnnnnnnnnnnnnnnnnnnnnnnnnnnnnnnnnnnnnnnnnnnnnnnnnnnnnnnnnnnnnnnnnnnnnnnnnnnnnnnnnnnnnnnnnnnnnnnnnnnnnnnnnnnnnnnnnnnnnnnnnnnnnnnnnnnnnnnnnnnnnnnnnnnnnnnnnnnnnnnnnnnnnnnnnnnnnnnnnnnnnnnnnnnnnnnnnnnnnnnnnnnnnnnnnnnnnnnnnnnnnnnnnnnnnnnnnnnnnnnnnnnnnnnnnnnnnnnnnnnnnnnnnnnnnnnnnnnnnnnnnnnnnnnnnnnnnnnnnnnnnnnnnnnnnnnnnnnnnnnnnnnnnnnnnnnnnnnnnnnnnnnnnnnnnnnnnnnnnnnnnnnnnnnnnnnnnnnnnnnnnnnnnnnnnnnnnnnnnnnnnnnnnnnnnnnnnnnnnnnnnnnnnnnnnnnnnnnnnnnnnnnnnnnnnnnnnnnnnnnnnnnnnnnnnnnnnnnnnnnnnnnnnnnnnnnnnnnnnnnnnnnnnnnnnnnnnnnnnnnnnnnnnnnnnnnnnnnnnnnnnnnnnnnnnnnnnnnnnnnnnnnnnnnnnnnnnnnnnnnnnnnnnnnnnnnnnnnnnnnnnnnnnnnnnnnnnnnnnnnnnnnnnnnnnnnnnnnnnnnnnnnnnnnnnnnnnnnnnnnnnnnnnnnnnnnnnnnnnnnnnnnnnnnnnnnnnnnnnnnnnnnnnnnnnnnnnnnnnnnnnnnnnnnnnnnnnnnnnnnnnnnnnnnnnnnnnnnnnnnnnnnnnnnnnnnnnnnnnnnnnnnnnnnnnnnnnnnnnnnnnnnnnnnnnnnnnnnnnnnnnnnnnnnnnnnnnnnnnnnnnnnnnnnnnnnnnnnnnnnnnnnnnnnnnnnnnnnnnnnnnnnnnnnnnnnnnnnnnnnnnnnnnnnnnnnnnnnnnnnnnnnnnnnnnnnnnnnnnnnnnnnnnnnnnnnnnnnnnnnnnnnnnnnnnnnnnnnnnnnnnnnnnnnnnnnnnnnnnnnnnnnnnnnnnnnnnnnnnnnnnnnnnnnnnnnnnnnnnnnnnnnnnnnnnnnnnnnnnnnnnnnnnnnnnnnnnnnnnnnnnnnnnnnnnnnnnnnnnnnnnnnnnnnnnnnnnnnnnnnnnnnnnnnnnnnnnnnnnnnnnnnnnnnnnnnnnnnnnnnnnnnnnnnnnnnnnnnnnnnnnnnnnnnnnnnnnnnnnnnnnnnnnnnnnnnnnnnnnnnnnnnnnnnnnnnnnnnnnnnnnnnnnnnnnnnnnnnnnnnnnnnnnnnnnnnnnnnnnnnnnnnnnnnnnnnnnnnnnnnnnnnnnnnnnnnnnnnnnnnnnnnnnnnnnnnnnnnnnnnnnnnnnnnnnnnnnnnnnnnnnnnnnnnnnnnnnnnnnnnnnnnnnnnnnnnnnnnnnnnnnnnnnnnnnnnnnnnnnnnnnnnnnnnnnnnnnnnnnnnnnnnnnnnnnnnnnnnnnnnnnnnnnnnnnnnnnnnnnnnnnnnnnnnnnnnnnnnnnnnnnnnnnnnnnnnnnnnnnnnnnnnnnnnnnnnnnnnnnnnnnnnnnnnnnnnnnnnnnnnnnnnnnnnnnnnnnnnnnnnnnnnnnnnnnnnnnnnnnnnnnnnnnnnnnnnnnnnnnnnnnnnnnnnnnnnnnnnnnnnnnnnnnnnnnnnnnnnnnnnnnnnnnnnnnnnnnnnnnnnnnnnnnnnnnnnnnnnnnnnnnnnnnnnnnnnnnnnnnnnnnnnnnnnnnnnnnnnnnnnnnnnnnnnnnnnnnnnnnnnnnnnnnnnnnnnnnnnnnnnnnnnnnnnnnnnnnnnnnnnnnnnnnnnnnnnnnnnnnnnnnnnnnnnnnnnnnnnnnnnnnnnnnnnnnnnnnnnnnnnnnnnnnnnnnnnnnnnnnnnnnnnnnnnnnnnnnnnnnnnnnnnnnnnnnnnnnnnnnnnnnnnnnnnnnnnnnnnnnnnnnnnnnnnnnnnnnnnnnnnnnnnnnnnnnnnnnnnnnnnnnnnnnnnnnnnnnnnnnnnnnnnnnnnnnnnnnnnnnnnnnnnnnnnnnnnnnnnnnnnnnnnnnnnnnnnnnnnnnnnnnnnnnnnnnnnnnnnnnnnnnnnnnnnnnnnnnnnnnnnnnnnnnnnnnnnnnnnnnnnnnnnnnnnnnnnnnnnnnnnnnnnnnnnnnnnnnnnnnnnnnnnnnnnnnnnnnnnnnnnnnnnnnnnnnnnnnnnnnnnnnnnnnnnnnnnnnnnnnnnnnnnnnnnnnnnnnnnnnnnnnnnnnnnnnnnnnnnnnnnnnnnnnnnnnnnnnnnnnnnnnnnnnnnnnnnnnnnnnnnnnnnnnnnnnnnnnnnnnnnnnnnnnnnnnnnnnnnnnnnnnnnnnnnnnnnnnnnnnnnnnnnnnnnnnnnnnnnnnnnnnnnnnnnnnnnnnnnnnnnnnnnnnnnnnnnnnnnnnnnnnnnnnnnnnnnnnnnnnnnnnnnnnnnnnnnnnnnnnnnnnnnnnnnnnnnnnnnnnnnnnnnnnnnnnnnnnnnnnnnnnnnnnnnnnnnnnnnnnnnnnnnnnnnnnnnnnnnnnnnnnnnnnnnnnnnnnnnnnnnnnnnnnnnnnnnnnnnnnnnnnnnnnnnnnnnnnnnnnnnnnnnnnnnnnnnnnnnnnnnnnnnnnnnnnnnnnnnnnnnnnnnnnnnnnnnnnnnnnnnnnnnnnnnnnnnnnnnnnnnnnnnnnnnnnnnnnnnnnnnnnnnnnnnnnnnnnnnnnnnnnnnnnnnnnnnnnnnnnnnnnnnnnnnnnnnnnnnnnnnnnnnnnnnnnnnnnnnnnnnnnnnnnnnnnnnnnnnnnnnnnnnnnnnnnnnnnnnnnnnnnnnnnnnnnnnnnnnnnnnnnnnnnnnnnnnnnnnnnnnnnnnnnnnnnnnnnnnnnnnnnnnnnnnnnnnnnnnnnnnnnnnnnnnnnnnnnnnnnnnnnnnnnnnnnnnnnnnnnnnnnnnnnnnnnnnnnnnnnnnnnnnnnnnnnnnnnnnnnnnnnnnnnnnnnnnnnnnnnnnnnnnnnnnnnnnnnnnnnnnnnnnnnnnnnnnnnnnnnnnnnnnnnnnnnnnnnnnnnnnnnnnnnnnnnnnnnnnnnnnnnnnnnnnnnnnnnnnnnnnnnnnnnnnnnnnnnnnnnnnnnnnnnnnnnnnnnnnnnnnnnnnnnnnnnnnnnnnnnnnnnnnnnnnnnnnnnnnnnnnnnnnnnnnnnnnnnnnnnnnnnnnnnnnnnnnnnnnnnnnnnnnnnnnnnnnnnnnnnnnnnnnnnnnnnnnnnnnnnnnnnnnnnnnnnnnnnnnnnnnnnnnnnnnnnnnnnnnnnnnnnnnnnnnnnnnnnnnnnnnnnnnnnnnnnnnnnnnnnnnnnnnnnnnnnnnnnnnnnnnnnnnnnnnnnnnnnnnnnnnnnnnnnnnnnnnnnnnnnnnnnnnnnnnnnnnnnnnnnnnnnnnnnnnnnnnnnnnnnnnnnnnnnnnnnnnnnnnnnnnnnnnnnnnnnnnnnnnnnnnnnnnnnnnnnnnnnnnnnnnnnnnnnnnnnnnnnnnnnnnnnnnnnnnnnnnnnnnnnnnnnnnnnnnnnnnnnnnnnnnnnnnnnnnnnnnnnnnnnnnnnnnnnnnnnnnnnnnnnnnnnnnnnnnnnnnnnnnnnnnnnnnnnnnnnnnnnnnnnnnnnnnnnnnnnnnnnnnnnnnnnnnnnnnnnnnnnnnnnnnnnnnnnnnnnnnnnnnnnnnnnnnnnnnnnnnnnnnnnnnnnnnnnnnnnnnnnnnnnnnnnnnnnnnnnnnnnnnnnnnnnnnnnnnnnnnnnnnnnnnnnnnnnnnnnnnnnnnnnnnnnnnnnnnnnnnnnnnnnnnnnnnnnnnnnnnnnnnnnnnnnnnnnnnnnnnnnnnnnnnnnnnnnnnnnnnnnnnnnnnnnnnnnnnnnnnnnnnnnnnnnnnnnnnnnnnnnnnnnnnnnnnnnnnnnnnnnnnnnnnnnnnnnnnnnnnnnnnnnnnnnnnnnnnnnnnnnnnnnnnnnnnnnnnnnnnnnnnnnnnnnnnnnnnnnnnnnnnnnnnnnnnnnnnnnnnnnnnnnnnnnnnnnnnnnnnnnnnnnnnnnnnnnnnnnnnnnnnnnnnnnnnnnnnnnnnnnnnnnnnnnnnnnnnnnnnnnnnnnnnnnnnnnnnnnnnnnnnnnnnnnnnnnnnnnnnnnnnnnnnnnnnnnnnnnnnnnnnnnnnnnnnnnnnnnnnnnnnnnnnnnnnnnnnnnnnnnnnnnnnnnnnnnnnnnnnnnnnnnnnnnnnnnnnnnnnnnnnnnnnnnnnnnnnnnnnnnnnnnnnnnnnnnnnnnnnnnnnnnnnnnnnnnnnnnnnnnnnnnnnnnnnnnnnnnnnnnnnnnnnnnnnnnnnnnnnnnnnnnnnnnnnnnnnnnnnnnnnnnnnnnnnnnnnnnnnnnnnnnnnnnnnnnnnnnnnnnnnnnnnnnnnnnnnnnnnnnnnnnnnnnnnnnnnnnnnnnnnnnnnnnnnnnnnnnnnnnnnnnnnnnnnnnnnnnnnnnnnnnnnnnnnnnnnnnnnnnnnnnnnnnnnnnnnnnnnnnnnnnnnnnnnnnnnnnnnnnnnnnnnnnnnnnnnnnnnnnnnnnnnnnnnnnnnnnnnnnnnnnnnnnnnnnnnnnnnnnnnnnnnnnnnnnnnnnnnnnnnnnnnnnnnnnnnnnnnnnnnnnnnnnnnnnnnnnnnnnnnnnnnnnnnnnnnnnnnnnnnnnnnnnnnnnnnnnnnnnnnnnnnnnnnnnnnnnnnnnnnnnnnnnnnnnnnnnnnnnnnnnnnnnnnnnnnnnnnnnnnnnnnnnnnnnnnnnnnnnnnnnnnnnnnnnnnnnnnnnnnnnnnnnnnnnnnnnnnnnnnnnnnnnnnnnnnnnnnnnnnnnnnnnnnnnnnnnnnnnnnnnnnnnnnnnnnnnnnnnnnnnnnnnnnnnnnnnnnnnnnnnnnnnnnnnnnnnnnnnnnnnnnnnnnnnnnnnnnnnnnnnnnnnnnnnnnnnnnnnnnnnnnnnnnnnnnnnnnnnnnnnnnnnnnnnnnnnnnnnnnnnnnnnnnnnnnnnnnnnnnnnnnnnnnnnnnnnnnnnnnnnnnnnnnnnnnnnnnnnnnnnnnnnnnnnnnnnnnnnnnnnnnnnnnnnnnnnnnnnnnnnnnnnnnnnnnnnnnnnnnnnnnnnnnnnnnnnnnnnnnnnnnnnnnnnnnnnnnnnnnnnnnnnnnnnnnnnnnnnnnnnnnnnnnnnnnnnnnnnnnnnnnnnnnnnnnnnnnnnnnnnnnnnnnnnnnnnnnnnnnnnnnnnnnnnnnnnnnnnnnnnnnnnnnnnnnnnnnnnnnnnnnnnnnnnnnnnnnnnnnnnnnnnnnnnnnnnnnnnnnnnnnnnnnnnnnnnnnnnnnnnnnnnnnnnnnnnnnnnnnnnnnnnnnnnnnnnnnnnnnnnnnnnnnnnnnnnnnnnnnnnnnnnnnnnnnnnnnnnnnnnnnnnnnnnnnnnnnnnnnnnnnnnnnnnnnnnnnnnnnnnnnnnnnnnnnnnnnnnnnnnnnnnnnnnnnnnnnnnnnnnnnnnnnnnnnnnnnnnnnnnnnnnnnnnnnnnnnnnnnnnnnnnnnnnnnnnnnnnnnnnnnnnnnnnnnnnnnnnnnnnnnnnnnnnnnnnnnnnnnnnnnnnnnnnnnnnnnnnnnnnnnnnnnnnnnnnnnnnnnnnnnnnnnnnnnnnnnnnnnnnnnnnnnnnnnnnnnnnnnnnnnnnnnnnnnnnnnnnnnnnnnnnnnnnnnnnnnnnnnnnnnnnnnnnnnnnnnnnnnnnnnnnnnnnnnnnnnnnnnnnnnnnnnnnnnnnnnnnnnnnnnnnnnnnnnnnnnnnnnnnnnnnnnnnnnnnnnnnnnnnnnnnnnnnnnnnnnnnnnnnnnnnnnnnnnnnnnnnnnnnnnnnnnnnnnnnnnnnnnnnnnnnnnnnnnnnnnnnnnnnnnnnnnnnnnnnnnnnnnnnnnnnnnnnnnnnnnnnnnnnnnnnnnnnnnnnnnnnnnnnnnnnnnnnnnnnnnnnnnnnnnnnnnnnnnnnnnnnnnnnnnnnnnnnnnnnnnnnnnnnnnnnnnnnnnnnnnnnnnnnnnnnnnnnnnnnnnnnnnnnnnnnnnnnnnnnnnnnnnnnnnnnnnnnnnnnnnnnnnnnnnnnnnnnnnnnnnnnnnnnnnnnnnnnnnnnnnnnnnnnnnnnnnnnnnnnnnnnnnnnnnnnnnnnnnnnnnnnnnnnnnnnnnnnnnnnnnnnnnnnnnnnnnnnnnnnnnnnnnnnnnnnnnnnnnnnnnnnnnnnnnnnnnnnnnnnnnnnnnnnnnnnnnnnnnnnnnnnnnnnnnnnnnnnnnnnnnnnnnnnnnnnnnnnnnnnnnnnnnnnnnnnnnnnnnnnnnnnnnnnnnnnnnnnnnnnnnnnnnnnnnnnnnnnnnnnnnnnnnnnnnnnnnnnnnnnnnnnnnnnnnnnnnnnnnnnnnnnnnnnnnnnnnnnnnnnnnnnnnnnnnnnnnnnnnnnnnnnnnnnnnnnnnnnnnnnnnnnnnnnnnnnnnnnnnnnnnnnnnnnnnnnnnnnnnnnnnnnnnnnnnnnnnnnnnnnnnnnnnnnnnnnnnnnnnnnnnnnnnnnnnnnnnnnnnnnnnnnnnnnnnnnnnnnnnnnnnnnnnnnnnnnnnnnnnnnnnnnnnnnnnnnnnnnnnnnnnnnnnnnnnnnnnnnnnnnnnnnnnnnnnnnnnnnnnnnnnnnnnnnnnnnnnnnnnnnnnnnnnnnnnnnnnnnnnnnnnnnnnnnnnnnnnnnnnnnnnnnnnnnnnnnnnnnnnnnnnnnnnnnnnnnnnnnnnnnnnnnnnnnnnnnnnnnnnnnnnnnnnnnnnnnnnnnnnnnnnnnnnnnnnnnnnnnnnnnnnnnnnnnnnnnnnnnnnnnnnnnnnnnnnnnnnnnnnnnnnnnnnnnnnnnnnnnnnnnnnnnnnnnnnnnnnnnnnnnnnnnnnnnnnnnnnnnnnnnnnnnnnnnnnnnnnnnnnnnnnnnnnnnnnnnnnnnnnnnnnnnnnnnnnnnnnnnnnnnnnnnnnnnnnnnnnnnnnnnnnnnnnnnnnnnnnnnnnnnnnnnnnnnnnnnnnnnnnnnnnnnnnnnnnnnnnnnnnnnnnnnnnnnnnnnnnnnnnnnnnnnnnnnnnnnnnnnnnnnnnnnnnnnnnnnnnnnnnnnnnnnnnnnnnnnnnnnnnnnnnnnnnnnnnnnnnnnnnnnnnnnnnnnnnnnnnnnnnnnnnnnnnnnnnnnnnnnnnnnnnnnnnnnnnnnnnnnnnnnnnnnnnnnnnnnnnnnnnnnnnnnnnnnnnnnnnnnnnnnnnnnnnnnnnnnnnnnnnnnnnnnnnnnnnnnnnnnnnnnnnnnnnnnnnnnnnnnnnnnnnnnnnnnnnnnnnnnnnnnnnntccactccagtctgggggacagagtgagacccccatctcgaatatacacacacacatacacagactcacacgctatccgctggtgcccctgtcagttaaacacagcatctcagggcaccttagcacacagtgtgagagccgtggtcctaaacacttcaattagaagtgaaacatctctggctggatttttagaatatttactttttaatgttttatattatatttattttttatgttttaattaatttatctgaatacaagactccagacatttggaagtaaaacaatggaaaacatgcctgcaaacactaatcagcacaaagctcatgttgctatgttattattgacagtttagacttaagcaaagaaatattgctaagataaaaaagattttacaatgtcagtcactagaaaagtatgccaattttaaatatgtataaatataaaatatcccttcaaattatttactacagaaactgatatgactaaaagaaaaatggactaatctacaatatagattttaacatacctttcaattaccgatggaaccaacagaaaaaaatccataagagaaagggagatttgatgaacacaatgaacaaacttgacataaactgacatatacagaacgcgacactcaacaactactgaatacacatccttttccagtgcacgtatcatatttaccaacatagattatacgttggaatttaaagggactcatcacagagtattcagtcgtgggattttgcctaaacttgtctggccttcaacagggttcaaatacagttaaattcttatttcatctaaagagtcctatccttttatttttttggaaattttaccgcaacaatctaaatttgcataacaactgaacccaccccttggaacttgaagtttattctagccaaaggcagattaaactgtctaagtagtaatgtccttcaaattgttgtcccctgctccagtaacggagtatagctccaagaagctaacagactatttgtccctcatagcatacattctatgttacatcaaaacgtggtataaagccttgaaatcagcagcagagagaaaatgagatcaacaaccatctagccatgacctcactacttagtaattacgcttttagctgtctcctttacttgattcctaactgcttatttctggcagggtagcactaatctctgaccaagctgaccttttaagaaatgagcagaacgaaaaggctctgccaccagtgatcagtttaacaagctgcaacactagtcactggctgcaactctagtcactggctgcaactctagtcactggctgcaactcatattgtgggttttaagagctcagaattaacatggaaatactattgactcgaaaagaaacccagaaatctctgggaatccagcaaagatagaaagggtcctctcaatagtcaccactcacactttgctttgttttggtaactattttattacatacggagaatgtcaaaaaagtatgccttttcctcattgttaatgctaaccctaaaatggtaaggctcttgcaggttgaaacccccaggctctcactggcctttcagcagaaggcagtgaagtcacctgcaaaagcgatcacccaaaagcttccaggctggacaagtttggactcagttcttgtagttcccaaattcacagttctcttgggacatggttatttatggagctcctgaagatgagaaattccacccaggaaattctgtttataaaagattattcacatctaattatctcaggagacattaacacagcaatgttgaaaatctcccattgttaatccatggagaaaaactggacaaaaattttttaaaatatgaaaagcttcatataatacaaattatacttccacatgtgattcaatttctattcattaatgccagagaagttaataattatgaattgccagtggttaaaaaaaaataaatcattcatcactggagaagtacagaaggtttaaaagagataagaattagtttttggctttggggcgttttatgctttccaaaaggttttgctcttttttttttttttttttttttttttttttttttttttttttttttcttttttttgggcgcatagcttgccccctctccctctctctttctttccgattacagtttcttttgatttctcctgcttagaaatggtgagagaactttggatgtggaatgtggagtaggaggaacacgaagtggggatctgcacttggggtggtcagcactgcggatgcccagcaaaggcactgcctggtccacatcccggagtggtctctgcgcccgagtcggcatcgcagctgatggtgaaacttttggtgtggcagaagagtgtccacaaactttggaaggtatccgctgcctcctccatagccgtgtatccctgccgagggcgatcatctcggggagccgaaagtccggctcatgggccagggctggctggctggagccacttgcgcggcgcagccctggcggaggttcaggcggccccggtgtcgcaagcggctgtgagtgatgcctccttggtgccggaggggtcccaggaagtctgaagaccagggctgaccagcgggcagcatggtggccgcgatagaaggtgacagggttcgcagcgccaggggacccagcagagcccgagcccgggcatcccgcatctccagcagcaccgcggggaagcctggcgctggtgacgtggcggccagtgcacaaggcccacgacccagtcccagaggccagcccatcgtcagctaacttcaggaaccctgggccagctgaggccccgggccccaggggcaagacaaagggcagagggtccgcaggcggggccgagagcaggcagtgcaggcctggctccacaaccgcggagctcgcagggcacagcaggcaccgggcagcaaccagggcttccagaggaggctgtgcacccccgcaaaggctcctgcccggcgtccagcctatccgcggggactccacgtgcaccccctcctcattgtccttgtctagggccgcagcaaggtcctggctcccatggcgtgactctgggggcgcaggagcatgggctgagcaggtggagtagggtgagcactgccaagaacccagcgagagtggcgccccagggcagcacaggaggccgcatttaacgtataaatcatctcaaagattttatggcatcttcttttttttgacatcttataatatctataatgtctattatatcttgtgatataattattaacaccacttcattgtgattattatgattatttttataccaacacgtcttcgattattaatattcccagttgctagagaaaaatgaaaacgactagttttgaaagccttacttctgccaatggaagcacattccagcatgtcgccaacccaatccactttccaccactttcacaagaaacgttactgcacaattatactatcctaaccttatatactttttgtgtgtgtgtgtgtacttgtatgtatgtatgttacatatgttatatatatatatatgaagtatgccagagatgaacaagtattagaaaattaaatgcacacaggtcatgtcagtgctatgtataatgtggtgtactaagtatagatgttcaacagtgtgggatccaggccagaacaagactcctagtcttaagcaattctttctaggttcagtctctagaaataatgctttgtatcaaatgtgcgagaaaattaatgggttttaaagactattctatgtcaactataacatttcatttggggatttctgtctcttataatatctacctcattttggatggattccttgagggctggtttatttttcttttcctttctatacatcgctgctcagagtgatgaatggtgttgtattttgaataaaatatctaagcatccttttgtgagcaaggagcatgatggttggtacttagacctaccatttctcgttacagtggttatggttacagtggggctggggtgtttacctggagcctggacgtccactgggacatgatacccactgggatttttttgtgtcaacctggtctatgatgtccacctggggactgggtatccacctaaggcctgatgtttacctggagccagatgtgcacctgaggcctgatgtctatctgtggcttatattcacctggggaccgatgcacatctgaagcataggtattcacctggggcctcatatccacctgtagtatgggtgtcaaccttggggcggatgttcagctggcgtccactctctacctggggcctggtgtacacatggggcctgggcatccacctgagacttgatgtttaatatggtctggagttttcttgggacctgttgtaccctggagcctgggtgtatacatggagcctgatgtcccaggtggacacccgggtcccagtggatcttcaggccctaggtgaaaactccaggctctaagtggacaaccaggccccaggctgatgtttactggggccagatgtctaccaggccccaggtgaaaactccaggctccaagtggacaacatggctccaggttccaggtagacactggaatccaaatcaacaccaggccccagatggacacccaggccctgtggtggacatcagactccagaaagtcatctgggctcgaggtggacatcaagccccaggtggatacctagtccccaggtagatatcaggccccactttgacgccagtccctgggtagataccttggcctcaggtggatatccagtctctagctaagcctcaggctccaggtggacccaggccccagctgactggggactagtgttcatatggggccacatgtccatctgggccctaggtgtcaactagtagcctgatgtcaacctgggagctggtgttcaccagaggactaaagtcctcctggtggctgatgtccaacttgggactttgtgtccacctggagactgatgtccacttgggaccagatgtccaactggagcaagatgtccacctgtagcctagaacttcacctaaggcctgatgttccccagggcctacagggcctgtgtatctacctagggacttgtgtccaggtggggcctgagttccatctggggtctggaattaacctgggacctgatgtccacctgaggcctggtgttcctctggagtctgatatctatctggggcctaggtgtcctcctatggtctgatgtccacttgtaggctggtgtccacctggggcctgggtgtccacctaggaacctgatgtatacctgaagtccagtatctacctgggtactgatgtctaccaggaaagtgatataaacctggggcctgatagccacctgggccccgagtgtccacatatgttctgatttctgcttttggcctgagtgtagggcctgggtgccacctgggtcctgatgttcaccaggaacctaggtattcacttggggcttgctgtccacctggggcctaatgtccacgcgagacctggtgttcacctagggcctgggcagccacctgtggcctgatgttcagttggcgactgggaattccactaaggcttgatgtccacctggggcataggtgaccacttgtggcctagtgttcccctgaagcctaggtgtcaacccagggcataacgtcttcttggggcctgctgtccacctgcagactggtgtctgcatagggcctggtatccacctggggtctggtgtctgcgtggggcctagtgtccacctgaagactgagtacagacctcacacctgatgtatgcctggggcctatttatccacctgggggctagcattcatctggcgcctcatgtccacttaagccctgggtgtcaacctggtgcctaatggccaccagggatctatgtactcacttggggcctggtgctcccatagggcctaggtatacacctggggaatgatgtgcaggtggaggcggatgtcttcctgggtgctgctgttcacctggggacaagggtctccctggggaccggtgtttatcgggagcctcatatgcaccttgaacctgctgtctacctagggcccgatgtccatgttaaggctgggtgtccacctgggacctgggtgtccacttggggcctaatgtccacctaagacctagtgttcacctagggcctgggtgtccacctggagcctgatgttcagctggagatgcatccacccgagacctaggtatccacccagggtctggtgtcgaactggggccttatgtccaccgggggactagatatctacctgaggcttgatgtccacctggagcccatatccacctcagagctgggtgtccacccaggttctggtatccacccggagcctggtgttcatctggggcccagtgcccacctggaacctgggtatcaccatggggcctgggtgtccacttggagcgtgatgtgcacctgggacctgagtttccacctagggcctgatgaccacctggggtctgatgtctacctgaagcctaggtaaccacctagggcatggtgttacctgtgcctttatttccacctgagcctggtgtacacctggggcctgggtgtccatctgaggcctgatgtactcctcaagtccagtgtccacttgtggcctgatgtcaacttggaagctgatatccacctggggactgatgttctcctggggtctgatatccaactgggatcagatgttcacctaaggcctggagttaatctggggcctgatggtcaccagggtcccaggtgtccacctagggcctagtgtccaactagggcctgatgtccacctggagtctagtatccgccttggccttgatgctacttgaggcctgggtgtcttcctagaacctgagtccccaattgggccctgatgtccacctgagacctggtgtccttacagggtctgatatctacctaaggcctgggtatcctcctgcagcctgatgctcacctgtaggctggtgtccatatggggcctgggtgtctacctgtgagcctgatgtacacctggagtccagtgtccccttggttactaatacgtaccaggaaaatggtatatacctggggcctgatatacacctggagcctgcatgtccacctgagccctgatgtccacctggggcctatattcacccactacccaaagtcaagtcgggaaaagggcccagaataggtgaggagcacaggtcaaagcctctcagtcctgcttgtatttctccaagagtgatctggagaccaactgcatcagaactgtggggtgaggtcacagcccctgcctgtgagaagtacagattcctcttcctggaccagaatccctgggaactggacccaggaatttcccaagatctctgggggactctgagacagcccaagtatgggaactgcagatttcctcctgaaaagggagcactgtctcaaggggtccaggtcacccaactctaccttgtagccaccagaccagtctgagccttggagaatgctgctctttcctcctggaatgcccttcccagcgttccttgcctggtaactctcacacatccctcaagacccaactcaagggccacctcctcctgacgtcactccctgaactttctcctgtgtttccactctcctcttcaccaagtgatgttgacatttctatgggaccatctctctctagacaagaaacgcctacagttgcagccccctgtagtgcaatttgtgtcagtctgggaagagtggatttggagcccaaccaccattgaggaaaatccgtctgatggacatggcgggttccagcccagatgcaggggtcagcgaggggtgatgtgacagtgagcacagaccctgggtggtggtgacagtggctgtcatggggaggaaaggaatggaaaaaggacctcatgggagcagaaagacaggccttagctgcagatgggccaggaccccacaaggaatccagaacccgcatcctaatcccagctctgctgtaagtccacagcggaaccctggcagtgactttcccctttctgagcctcattttactcatcagtaaaatggtgacgataactccaacttcaccaaggagatgcaaggctcaatgagatgatggatctgaaaatgccttgtgtttcatggcacaaaggagagggattcctgacatgcgacaagcgcagggagagaggaaggatggggtctgtaaatggccaggtggcagcccacccctccacacacacaaacacccaccgtgtcacccacactggtgattttcccaggagctcccctggcctggaattagcactgtcagtgggcagggaggactgtcgtgccattacaggggtgaggatacaggctgtggatggtcccacagggaataaggagcagggtctagctccccatggcggcagggaagattgaagttgctccctgggaagaggaagggaggcattgactggcactccgtgatttagatgagaagccctggctcagcccggtgacttgagcttcctgatgtagaaggtgaaggatgcagaggagacagagggcaggaggaagaagataaggaagagagcagcaaactggagtcactacaggacactagctgctccaggctgctctgtcccattctaagagaaaaggaaaagtgggagaggggatcacagatcatgtccagatttctcactggcatggatgctgctatggaaacatccctgatggtccaggtttgtggtgggagagattgcaacactctgcttcctggaaatctgtgtttacagccaacacagttgctgcccgagacagccccacctgaaaaccccagagctgccccagcttgccaggcttcccctcctcctgttatcaccccatgctgctgagaacctgcctggcaggctgcccagccaaggccggggcctaatctcaagtgaaactgacatgtccttgtgaggactgaggaacatcctctctccccacagagcctcactcaggttctcatctacttccttggggtctgccccgcctccctcaggagtttggaaccacatactgttctggaggggacctctcactgctgcagaacctgtcctccaggatacccacaagtgttcatctcggtcgtggctaattaacttatcatatggtagtgaactaccttctggagccccaatagtttgtttattttttaaaaataaaattagtaccattgtttattttctgaatgtacagaaatatttgtctgattattatttacatgccctttgggaaaactttataaaataaaaaaagaaggagaatcctaccacacagagataatcactttaataatttttctattcatatctgcacatacaggtatatatgggatcatgctctgtatctgttgggagtgcattaatctgaaagttcagtcacttaaacaaagacaggttcatttttcttacatagttagggtatctatggttcctggctatggttcactggttcaacagtgttaggcccagcatctttgtgagtctattggaatttagttcatggctgtaagacggctactgcagctccaaccactacatgagtttacaaggccagcaaaagcagtcacttctgtattcttattagaaaagcaggaacttcagcggtgacccccagaggatttctctttaggtctggaaatctgtgtttagattggccagaacctgatctcatgaccatccctagcagtagagaatagcattgtcatgattgactttggatcaatcataatttattgactgagagtgcacaagtggtcacccaaagaagatcaagaaaggagggaattagcagtgtgtactacagcatgcatgctattttatgatgtgctctttctcttaattgcatatttcaaacatctttccatactaagaaatacagattcagtcattcatttaacaacaaattattgagagtgtactgtgttccaggaacttaacttggcatggaggacacaataatgaacatagtatactccttgcctccatggagcttagcatctaatgagggatacagaaagtcatcaaagaggttcacaaagaaatgtaaaattatgattgtaatttgtgctgaaaaggagggagctgtgtggtgtgtgagagcagtgacaggagatttgactcaatcaggagggtctgtgttctgaatggccataagccagccccttgcctagctgtagcacaattatttagccaatctcttattgctggacatttacattcttcccacatcttacctactaccatcaatgcaacaataaatacccttctctaagtaccgcttggcacacttgtctgattatttcctcaggataaattcctagggtaaagccaggcaccatggttcattcctgtaatcacagctactcaggaggccaaagtgggacgatcactcgtggccagtagttcatggccagcctgggcagcatagggaagtcttgactcacaaaaaaatcctagaagaaatgaacaattcttagatgtcaaattgccaaatcaaggggtgcaccatcaccatccccatactcaccatcaccatcctcattatcatcatcagtctcaccctcaccattctcaccagcatcagcagcagcatcctcaccataactatcagtatctatcaccaccttcagcataccatcctcaccatcaccatcatcttcattaccaccaccattttcaccatcaccatcctgaccatcaccatcattatcacctcatcaccatccttaccatcaccatcaccatgctcaccttcaccattctcaccattatcatcctcatcctcagcataactatcactatcattatcaccaccttcaccatcaccatcctcatcatcatcaccttaccatcaccatccttatcatcaccatcaccatgctcaccttcaccattctcaccatcatcatcatcatcctcagcataactatcactatcatcagcaccttcaccatcaccttcctcaccatcaccaacattatcaccatcactatcctcatcatcatcctcaacataactatcactatcattatcaccaccttcaccatcaccatcctcaccatcatcatcatcatcatcacaaccacaattatgaaaatcttggaggaaaaggagaggaggtagcatattaaaatacaggtactttgatgaggaggaacaggcagagttgaagctggggaggggatatcaaacaatggagacccccagaacataaaactaagaagctcaggctttgccgagaatcagaggcatccttgaagatttatcagcaggagagtatgcagtcagattcctgtttagccagaacattgagcagtcctcagaaggaagaagcagagggagggaggcccacagaggagacagaaccttcaacaccaaccagagtcctggtcctgggtccagcagatctggcaggaatgaggaatgggaggcttatgggtaaaggctgcagccaggcaggaaaaggcctcactctccctgccactcctttccctgctccccactttcctgtcccatctttgctaataggctaagcatctccaactgcacccacccactagatttgcctcaattcctcctcctctctcatgcctgaggcccaggtggcttccagagctgaccaggtctattttagaattttaatgagataatctgggtagaagtgctggtgccctgccagccacagcaggtactcctcatatggtaaactggaactgtcttctcagttcctacagctttgggttcaaattctgcctaatccagatgaccaccatctctcacctgagcagagaagcctcccattggtctcgctgtcccagaccttcctctttccaggtatcagcctgacaattttctcaaactgcaaacctggacatgtccctcccttgtccctttgattaaagggtaagatccaaattccttagcatgacaccccaggcactgaggagctaaggcccctccatttccaccttgacttgttcccctctagtagcattgctgacccacttgccttgttctttcaccacatggctttgatcctgttgctcttctgcctggagcatcttcctacatcttctctgcctggtgaatttctacttaacctacaaagccaagctcaccttctctgtgaattctacttcctccccatcatgctgcaaattgtctctctcactagacctccagcccctaaaaatcagggacagcttaatgcatgttggaaatggctactcctcacttaattaccctaattagctagttatattcctttatatttatgtttccccatttattgaagctttccacaagccaggcactgagatccaggggaggacaggggaggaccctgagggtaggacaagcatgagcactgaaggctacaatggcacaggcaccaacagatcatgtggggtgcaggaagcctcatctctagagtgtcttcctggtttaccatacgctttcttcccttcccttattggagtcaccttgtgctgactttgatagcctgtgtccctgaaacatgcactcccacacacacaaaccgacccacacctatccacatgtacctgcccatacatacacagacctctctgtgtatcccccagagctacaaatgccaatcttgagaatgaagattttgcaagtgctctgtgccaggcatgatgccaggtccctgacaacaaaagacccctctggtttctcccactcagctgtgcaaggttcggggttgaggagctccccctgccaaggtcacagacgtggaacatgaggtaacagctatttgaatgtaagcctgtaggtcaccaaaacataagccatctgcaccccaccacactgcctccaaagcacatgaagccatgagtctatcaactgtgactcattagtagccaggaatatttcctcctccacttcgcttcccactgccactccagtatctctgcccacagtcccagagccacctctgcttaacggggaggtcaggactgatgctccattccacccaatgccatctcccagggtgcagcctcctcacaggaaagaggactaccgtggctagtggtgacatgggtggctctggcctccaggacttctccccaggacctctgctcaggacatggcacggacagaggtgaggttgccataaaactgcctcggaaatgactacaaaccagctcagaccattccagcacctaacacgctgacagcccacggtgggcccacagaaggggaagggctagggagtccagggccgcaagagttcaccctccctgagcccttgagcacagccacccaggtgtaaagaacaatatgggggttctggggattcccaagcctgggccctagaggtgagttctagcagggcccccagatatcctccccatccatcccctcatcctgtctcacatattgtaaaaacaaggaaactgaggcctagagagggaaggggcttgaggagtctcccaggcagttagagacagagcccaagtgagaatctgtgtttctctcatttttttcccctaggtctgtctctgactagctatgtgaccttggaagaggcactccacctctctgggcattgaaggtttacaacttctgacatgttcattccagagggttgtcaggacctgacagcccttcacctaaacaaaacactctacagtctactaatattcgtatatctcttatcttctctgacctctgtaatacccctatgaggctgtgaaaattggtgcttgtgtcagaaagacaaagatcacgcagaaaatttgggacaggactggaactagaacccaggtctctcaaagcagggtccttgccatcactaaggctaggaatacattaagactccaaaatatggagagttgctcaatgcatgccaccaaggttagagctgaccaaccccagaatgctcagcggctctgagaccctggagtggcggactcaaggcagagggtgatgccgaaatcacacacatctgagctccaatccaaactccactacgcagctgtgtgaccccactttatgaggctcagcattctctagtacaaaatgaaactacagaaggtaccaaaaagctcaggatgaggggagaactgcaccctgaatgcaggactgccaggcaggtggtaagcactcattagcttctgtttcaagcacacaaatcatatgttgtttttcatcatgtctccccatggtgtctggtctatggctccagaaccaggaggcttctgatcaatccttatgctaaatgatagacagatagatgggtgggtggttagacaaataaatggatggatgcatggattgatagattgatgctgggatgaatggatggatgaatagatggatgaatggataaatgaatggataggtgctcagaagacagaataaaacagggattcaaaatgaaaataacaagatgattgaaggatggggctggtacatggaagagaggtacaagatccagcccttctggctctattcagccctacaaccacataccttggggtagcactggcacatgctccagattatacccctggataccatgatgctgccacagaaggtttcattgaactggggcccatcatggctcaggaggaatgtactgagagccaggagaagactcatacattgaagctgaagcagaaggtcttctcgtctgccaaagtctcctcagctgctatggctgccagccaggccctggcctgtgcacccctgccagaaggggcctgtgccatccaacataaacatccagacaggctcacaggaagagatgaagctcttggatcactgcaaatcaaggcttaaagttaaagggagggcaagaccccttcagctccaggcccattccctggacccaccagtgcagcagggctgaaggcagcatgcttcggtggaccagtgaacccactccccaccctctctccttcccttggggcccagaaggcctggagtacatgtgtgaacatgggtgagggagcatgcaagggaggaacaaggggaggttacaggggctgggccccaggcaagcctgtgacaaaaccttctttgcctactttggggctgaactgagtaaacagctgatcccacaccttctagccccgggaaacagggtacaactctgcagccaaaatatgttagaatgctgccagaggatttcaggatcccactgccaggcatttcaggatcctagattttagacccttcaaggatatgtgtccatctgggattcaggcatgatggcccatatgtagtggatggtgatgatgggcatgacatcattctaagcatgttacagctgttaactcacttaagggactgcatgaggcaggtattgctacacccactatgcagaggacactgagcacagacaactaacttgcccaaggtcacacagctggaaatggtagagaagctggaacgtgaacccagaagctgtgcccctggccacagggcaatcctgcttaatagcagcacaaggttatgggtgagagctctgatggcaaggcaggctgcctgggtttagatcctggctcctgtactgcggggcagcgtggtcttgatcacattacctgcctgtgtctgtttcctcctctgtaaaatggggataataacggtacctcccagcattggcgctgtctccaggcctaggtgtcctggatccttctgccccctttacactctgtgcagcatccagacctgcttgtaatgagctcctctactcccccaccaaagctctggtgaattaatgtccctgtggggtataagtgactgatagtaacttcctcaatctccttgcagcctaatctaagaagatgccttctaaagaatagcattctaatgtgaaatttttgtcctgtgaaaggctaatgggagaaatcagattcctttgcaaggttacagaaaaaacaggacaatgagtatctctaagagagaatgctcactttgagtgtcgatggggttaggtggccaatacaggatgaaaggctttcatttggctccctgacctgctggatttggggatttccctggacctggtcattacctctttcctcctgcccagcatgtgctcacaccagcccctctgcctcatagtccttcccacaggccttttttcttacatttttttagagaaggtaagctcagagggacttttaatatgccaatcgatgttaagaaaacacaagccaaagacaagtgcaaacatgctttcaaccaacattaatgaggaaacaagacacaaattctttttctttttatattttatttttgagatggaatctcactctgtcgctcaagctggagtgcagtggcgtgatctccactcaccacaagctcctccttctgggttcacgccattctcctgcctcagactcctgagtagctgggactacaggcgcctgcaaccacgcccagctaattttttgtattatggtaaagatggggtttcaccgtgttagccaggatggtctcgatctcctgaccttgtgatatgcccgcctcagcctcccaaagtgctgggattacagcttgagccactgagcctggccctgtttgttcttttactttaactttacaatgtatttgccatgttttaaaaataaatttaattggaattttattgaaattgtatgagacatgatttagtccaagatgaacacacaacattattattactgtttccatccagctatggcatatttctctagttgtcttttatatcgctcaataaaatttgtggctctgctacacttcctaataatcatacattatatttcattatttctaattattataatggattgcatgtacatttactatgtaccatatattatgcaatatattcattatctcaattcataaaacaatcatgtgatttagttggtgttattactagattattaacattgtacaagtaaagaaaataaagacaaaagaaaagagactcagcaaaatcaaaccaataaagacttcattagaattgttgggtatataataaaaatttaatacaactcaatgaaagcaaaaaaacattttaaaaaatgaccaggcagatttgagaaggagccaaacagaaattccagaaataaaaacataattgttgaaattgaagacagatttgacagcagattacatataattgaaaaggaagatgcaaactggaagacaggctgaagaaattgcttagaatgaagcccaaagaagtaaaaaaataagaaagaaacaagagacatggaagacaagagtgatattacaactaacaggatttcataagtagaacaataaaccgttagaaaggttttgtaaaaaagataatggcttggaattttcccaaagtgatgaaaaactccacccttcatattcaggaagctcaagttggacagatttaaaaggcgaaaaaaaacacctaaatgtatcatcataaaaataatggaaccctgaagaaaagaatatattgaaaataagcagagagaacattcagtttatccatgaaagaatacggacttagaccaagagctaatgtcttaaaaatggaagcaagaagacaatgtactaagaaaaaacaatcacatatgaaattaatatatcttttaataaacaggccaaatatagacatatttaagtcataaaaaacaaacaaatactgaatttgctaactaagagaccttcactaaaggaaattctaagagatgttcttcagtagaagggtgttcccctagatggaagacttgagttgtgagaagaaatggtgagcacttaagaagacaaatatctgagtaaatataaatgaacactgactatacaatatgtagtttccagtggattaagaataagatgagaagcaaaactataaaacttctacaaataatacagtaaaactaccttaataaaccccagtgggttttcatataaaacctaaacaaattctgttcaccagaaaaacactatcaggatcaaagacccaaatataaggggtaaaactataaaatttgtagaagaaaacataggtataaatctgtgaccgtgaattaggcaatgggtcttagatacaacaccaaatgcaagagtgacaaaaggaaaaaacaaactggacttcaacaaaattcaaaacttttgtacatcaaaggatactatcaggaaagtgaaaagaacccacagaatgagagaaaatacctattaagtcatacatctgatgaagaactaatgtccagaatatataaagaattcttagaataacaaaaagacaacccaattaaatgagcaaacaatctaaatgaagatttctctaaaaagatatacaaatggccaatcagcacatgaaaagatgctcaacatcattagtcattaaggatatgcaaatgaaaactacaactagataccacttcacatctacaagaatagctatttttttttaaaaaaaggaaaataacagatgttggcaaggaggtaggaaaaaatggaacctccatacactgctggtaagaatataaaatggtacagagactttggaaaacagttttgaagtttttcaaaaaatttaaacatagatttaccatatgcccactcttagatatataaagaaaattgcaaaaatacatccacacaaaacgagtacatgaatctcatcacagtacattattaatcatagtcaaaaaatgaacacaactccaatatccatgaactaatgaatggataaacaaaacatagtaaactcacacaatgggattcaggcatataaaccaatgaggtgctgagacaagatacaacatggatgaatcaggacaacatgctaaacaaatgaagccaaacaccaaaggtcacatatgattctgttttttctgatatttggcacatgctagtccatagagacagaaaatagtctagtggttgccagaggctggggaaagggggaaatggggagtaactgctagtaagtatggaatttctttttgaaacgataaaaatcttctagagttagagagtggtgatagctgtacaactttatgaatacattaaaagcacttatagcacctatagtcccagatactcaggaggctgttgcaggagaatcgcttgaacctgggaggcagaggttgcagtgagccaagatcgcaccactgcactccagcctgggtgacagagtgagactcgaaatgtggggaaaaaaatgcacttagtgtacacttagagtggatactgggctaaaagtgaagtgacaggccacaaactaggcaaatcttctatacacatacctgacaagggacttcagggaatcctaaaaatttcaatgacaaaataggagactatagacaaaagacatgaacaatgcacataaggaacccaaataacccataaacaaatgaaaataagctcagcctccttccaaaccacagagaagactatttcatatccaaatgaaaaaatgatatgaagtaaaggcaagaatgtgcacaaaccagtacccacgtaagttgccagtgggaatgtaaaatggtgttacttcttagcaaatttggtgtcatctattaaatagttcactgtgcataatcttgggccaagcactgccattcctgggcacatgccctagaaaatctctacatgtgaaccaaaaaccagcaccattgtatggaatagaaaaaaaaaatcaaaaacagaatggacaaacaaatttcactctctacaatcatatgatcagacagtgcagcaaggaaaatgaatgaatgaaagaaaaccacaatagcagcaaaaaacagcaagccagaatatataaggcatgattccttttatgtacagtttcaaaatatggaaaactcaaaaatatcttctatagggagaaaaacacacattcttagaatattataagcaaagacttttacttgtttctttttcagtttaaggatctgctgttctacttttgcaatttctcgatttatacgatccatactctgtattaactcttcctttgaaagttttgaaggtgaagcattttgatcatctccacatggttgccccgaaattggagaggatggagcttcatgtttgcctccaaatgttggatcctttagagaataaaaccaagaaaaacaatttatttctcactaatagagtccagattgccttaaatgaaaaagccagttttaaaccacagcagaaccatgtgtactatgtgtctaatgtttagtagtaactttcatatttatatatatgcaaattctcacctcacttttgtagtttagatataccatgtactattttgaagagcctaaaagctatacaaagtcaggtgagttagtgttgatcagcctctagtgtaacgatactgaaattataaagaatttataggtaaataatgcaatcatgacaaaggaagataccaacttctcagccatttccttgcaatggctcttcaaatggtctgaacaactggctgggaaatagtattattccaggtaacacctatgtgtccacccaacttaacaactataacacagccaagtgttcctatcaaaagttttcaggcttcccaaaccaaaactgaggtacacgagtcagagaagtgacctaggaacttcagttgctactatctctgggcctactttcataaagcccacactacagcatacgtaacacttccttagccaaaaacatcccattgcgcctccaaatcagcagagctgtagcagaatgaaagccctttcacccaaaatccactaccctccagcacacatccacacacaccctattaatttccagtctgctgtaaagacataagcaatattataaaacagataaattttagagtactaattttacttagactatgagaaacctacaatgagggtagttcacaggattaaagaaccctaaaatgtattaaataatgattaaggaactgtgaaaagtcaatagttctgagccaagaatgcatacaggagataactggacagttgcttcaaaacaccttagtacagatatttcagctaatatacattgatgaaaagcctcatattctgtaatagtatgcactgaatctaagaggccttctgggaaaataagattaaggctataccttaaaacctgtacaattctgtaaggaaagcaccaataaaagcaataacaattctaatatacttaataaagttaaagctccagtatcctttgcatctggcatacagtcaatctttggcagctttaagccctacagtttatgattcctctcttaagatgtaaatccgtgaggtcattggcttccaaaataaaccagtatgtttcatctaaataaagtatcagtggccgggcatggtggctcatgcctgtaatcccagcactttgggatgccaaggtgggcagatcacaagttcaggagttcgagaccagcctgaccaacatggtgaaaccccgtctctactaaaaaatacaaaaattagctgggcgtggtggcgggcacctgtagtcccagctactccggaggctgaggcaggagaacggcttgaacccaggagggagaggttgcagtgagctgagattgcactattgcactccagcacgggtgacagagcgagagtccatctcaaaaaaaagaaaaaaaaagtcagatttggcatataaccatctgtatcaacctctttttctccccctccctcctttatcatcgttaaaaaacacacaagaaaatttgtcttcacgttgtcttttcaatgctcgaatcttcagtaacaccgtgaaaagcacaacagttcttaaattcactaaaccagttactacttgcactaaatgaaaactaaatgcagaatgttcaaatatttttaagtcttcatgtgttctgaagcctttttcttcattatgagacgcgtactcctgagaacttagaaatgttaatgcataaagaaagatctttgatgaaccaccaggactttcatgatacattaatatcattctcccactatatgcatatgagtaaatttgtgttacagaaacatatataatagcaaaagagattacattttgattcagcagacttcaaaagtgctcctctggtgattctggtgcatgcccaaagaattaatattacaaataaatattttccactgacttcctttctaaatattaaatatttaataagaaaccaaatcctcaagtgcctacttatgtaacaggaatagggtgctggatcaaaacacacaagatatctgccttcatgaagcttacaatcttgggttgaaacagccagataccaatcctgaagaaaaagaattagattcttacctcatatcttacatcaaaaaaagccaagtaatagcaaacatttataagaggcttattagcaaatcacaaaaagcctcaagttaaaaaaaaaagattcacattatcttgggttcaggaaagccaaaagcaaaagatataaaagacattagtttttaaaaaagaaaaattgatggataaaataaaaaacaatcttctgctgggcacgatggctcacacctgtaatcccagcattttgggaggccgaggcaggcagatcacttgaggtgaggagttcaagaccagcctggccaacatggtaaaacccatctctactaaaaatacaaaaatcagccaggtgtggtggtacaagcctgtaatcccagctactcgggaggctgaggcaggagaatggcttgaacccgggaggcggaggttgcggtgagcagagatggcaccactgcactccaacctgggtgacagaggaagactccgtctcaaaaaaaaaaaaaactacacatgcaaaaacacaatcttctgcttatcaaaacagtaataacaaattaaaaaggcaaatgattaaatagggaaaccatttgcaaaacatgcactctaacaactcaatataaaataaaccaacagaataatgggcaacatatatgaaaaaacaatttacaaaacaggaaaaataaccaataaacaaataaaaaaagttacattttactaacaaatagtaagttaaaaacaatcattcatcaaattaacaatctttttgttaaacgataaacgtggtgtcagcaaggatacagaaggagtgggtacctttatttatttttatttattttttttattttttgagacaaagtctcactcttgtcacccaggctggagtgcaatggtgcaatctgagctcactgcaacctctgcctcccgggttcaaatgattctcttgcctcagcctcctgagtagctgggattacaggcttgtaccaccacacctggctgatttttgtatttttagtagagatgggttttaccatgttggccaggctggtcttgaactcctcacctctggtgatctgcctgcctcagcctcccaaagtgctagaattacaggtgtgaaccactgcgcccggtcaagaagtgggtacctttatacactgttgccaggagttaagaactggccctagtcttttgcaggacaatctggaaatacccactgaaccttaaaaatcaacctggtctgtaattaattatactaaaagaaatctaccttaaggaaataagtaagaatgcatacaaaaaaaaaacaacctaaataatgtatgggccagctgcagtggctcatgcctataatcccagcactttggggggccaaggtgtgcagatcacctgaggtcaggagttcgaaaccagcctggccaacatggtgaaacctcgtctccactaaaaatacaaaaattatctgaacttggtggcatgcgcctgtagtcccagctacttgggagcctgaggcaagagaatcgctgggagatataggttgcagtgagccaagatcgtgccactgcactccagcctgggcaataaaagtgagactctgtctcaaaaaaaaaaaaacaaaacaaaaacaatgcacgtcacaacaccgtacttctgaacaaacaggcaacctaaatgtatgacaattgattaaataaatatttaatcagtgaactttatttattcatatgtggaatactaagtagccactaacaatacagttgtaaacttattggcacgaaaagaagctaagcacatatttaagcaaaagtaaagttaaacagaatgtacaaagtgagcacattaaaatacttgtacgggctgactctggacatgctgcctatgggttagccctgttccacaaggagcagcagcaaaaaaaaaaaaaaaagaaagaaaaaagaacctacaaaataaaataaaataaaaattaaaataatacacacacaaatagggaagactcaacatgaaaatgttaataaattttaactggtaaaactgtaggtaattttttctttcaagcttatttaattcttctataaatgatatacctaggcttaacatctaaaaaaaaaatctaacaaatgttagttctttttaaatccttacttctggaggtgggcagttgggagagaatggggagagggagatggaaagagaagtattagttagtagtagtagtcatggtttacactttagaggagaaaaagcaggactagagtcaggggtcctaggttaattccaactcaggaggtactacctaggtcacttaattcttctgaacatccagtttctcaactataacatggaaatgggtcacactacaacacaacacactcactttaatgaatgagtttttaagacacttttctgctaaaaaacgaaattctataaattacatttgtggtaatgtattcagcgatggaagatgacctttattcattatatttttaaatttcttttttttaatgcagcagaacatttcttataaaccccacagactactgtatgataaagatatttcacatgataaggtgggtcacaaaacacctagaagcttagctaatttccagcttacggcaaacaatttttccccatccaacttactattttgaaaaatttcaaattcacttaaaagttgaaggaacagtgtaatggacaatcatttatccttcatctgaattcaccagtagttaacattttaacatatttgctttctgtgtgtgtctgtgtatgtgtataaaacttcattttggctgaactatttgaaaataaattgtagatacatttattatcttttaaattactcttcattgcatgaaaactcaaagaaaatatgtgggtacttatttatctgatatcagggaagaaagggcaattaggcataaaggttaataaacattacagaaaaaagatttgatggcagtaaaaacattttaaacttcagtatgctttaaaaaaaaaagaaaaattgaaacaaaaagacactgggaaaaatattagaatatgttaggcaggcagattgcttgaggccaggagttcgagaccagcctggccaacatagtgaaaacttggccctactaaaaatacaaaaaaattagctggggccgggcacagtggctcacgcctgtaatcccagcactttgggaggctgaggcagatggatcacctgaggtcaggagttcgagaccagcctgaccaacatggagaaaccccatctctactaaaaatacaaaatgagccgggcatggtggcacgtgcctgtaatcccagctactcgggaggctgaggcagtagaatctcttgaacccaggagatggaggttgcagtgagccgagatcgcaccactgcactccagcctggatgacaaagcaagactccatctcaaagaaaagtaccaatcctacacaaaccccttaagaaaacaggagtaaagagcactccccaagctaacatcattcttaatgcagaaagactgaaactcaatgcttaccacaccacatataaaattttaattcaaaataggtaatttacctaaatgaaagacctataattataaaacttagagaggaaaacataagtgaaaattggtcaggcgcgatggctcacacttgtaatcccagcactttgggaggccgaagcgggtggatcacgaggtcaggagattgaggctagcagggtgaaacctcatctctactaaagatacaaaaaaaattagctgggcgtggtggtgcctgtagtcccagctactcgggaggctgaggcaggagaatggtgtgaacccggggggcagagcttgcagtgagccgagattgcaccactacactccagcctgggcaatagagtaagacttcacctcaaaaaaaaaaaaaagcaaaacaaaacaaaaatagaaaaaaagaaaacgtaagtgaaaatcttagtgaccttgaatttcgcaaaaacgtcttagatttgacacaaaaagcacaaaaaatgaacaataaaaataagacatcggggctgggtgcagtggctaacacctgtaatcccagcattttggaaggccaaggagggtggatcacctgaggtcaggagttcgagaccagcctggccaacatggtgaaactccatctctactgaaaatacaaaaattacctgggcgtggtggcacatgcctataattccagctactcaggaggctgaggcaggagaattgcttgaacctgggaggcagaggttgcagtgagctgagatggcaccatagcactccagcctaggcgacagagcaagactctgtctcaaaaaaaaaaagtacatcggacttcataaaaataaaaaatgtacgctccccaaaggatactgttaagaaaattaggcaatacttcttttaataatctagatacaacagatatatagatctatgttttctaagtaattttacctataataatcaaaaactggaataggtgactggataaacaaattgtggtatacccatctcaacaataaaaaggaatgaactgagacatgccacacatggatagatcacagaagtattatgggaagcaaaagaggtcacaggcaaaagagttcccatgaagctcagaacgtatacaatgtttgatgatagatagcagatcagtggtttcctaggagctgaggttagtaggaagtgggagaggaggactgacacgggtgggtgccaaggaacgtgctggagtgttagaaatgttgttcatcttcattttggtgatggttctatgagtttatgactttgtcaaaatttgttacaatgtacacatataatgagtgcattctaatatagatatatgtgtatatatataaactaacttcaaagttaattttgttttttttaagacacggtttcactcttgttgcccaggctggagtccaccggcacgattttggctcactgcaacctctgcctcctgggttcaagcgattctccagcctcagcctcccaagtagctgggattacaggtgcctggctaattttttcatatttttagtagagatggggtttcaccatgttagccaggctggtctcaaactcctgacctcaagtgatccacccgcctcagcctcccaaagtgctgggattacaggcgtgagccactgcgcccggcctgattttatgaaaaaaacaccagcaacaataatccggaaaattggtaatcagatgaataacactggtgtaggagggggacaacacaagcaaaattcaacatccaatcatgacagaaattctcaaactaggaacagaaagcaacctcttcaaccaaaaaaagaatcaacaaaaacgtgcaactaacattacacgtaatggtaaaagactaaatgcctccctacacaggaacaacgttaagaatgcccattctaactctgtaatcatgactacacttcaaaggagtcctcagtaggaccccgtagtacattctgatgacaaatctgctttctgagtctctgagatgaccgttttatcccatcctttcctatttttctttaaacctcttacacccatatccttggtctaccctgagatgattatttcacctcatactttatttttcacaaggtaaatcaatctcttacaaactcttcctatgataaagtcttccttcctatctaccatcccttccttccttcctacctactatacaaatcttcgtaccatcaatctctcaagaagacagaggtctttatcctggccatcactcaagacatgccaagttatctggccagcttaaaactcaaccacaacttgagagtataaatataggtcttaccctagaaattctagagaattgataagttttctatttatcatcaactcctgtcatcaaaagcaaagacaagttcaactcctgaaattggcataaagccacagtaagaagacagaagtaattaattcccaacctttggttcctcgtctttgtaaatagctcttgccacttaaaaaaaaaggtaaatttggtggtttctaccaacatgtgtattaaataggaaaagcaaagaaaaacacaaaaaacacgtgcaatttgcatagtatttgttccttacctgctggtggcaggtgctgggaaacgtatactttacagagtgaggaggataatgactttgttctgtgctgaatgctccttggttgggagggtaacatgaacttgacattatcagtaaagaagtcctcaccagactgtgagatcaatgccaataaacaatcatgtttctaggaaaccacctaaacaggatgggaaaaaaatagaattaataagaactaaaacaccaagtgtacttctaataaattataactatagctacatatataaaaccacaattaccagtaaaagcttcctctcaagtatttacttaataaaagttaccaaggtttgaaaacattaatgcgtcatttctttttatatttaaaataggttaatatgtgacaaataatataattagctatataaagtaaaaacagtatataaaaacagcataatatctggcacatagtaactgctcagtaaataactttctataaatgtctgaggaatataaagacaaaaatacatggttttaaattttggagttgataagtcaatcatgaaaataattcaagagtagttttaaggtaagcatttgtgcagaggaagtattgtctttattaaataattctgaagcaaggatggtaaaatactaagttttgtaatcacagatggtaggtagatggacatttgttatgttactctttgcatgcttctatggaactgaaatagcaaataaagaaaaagaaggccagaagtagtggctcctcctgtaatcccagcactctgggaggctgaggtgggcagatcacttgaggtcaggagttcgagaccagcctggccaacatggtgaaacttcttttctactaaaaatacaaaaattagccgggcatggtgacatgcgcctgtaatcccagctacttgggaggctgaggcaggagaatagcttgagcctgggaggcagaggttgcagtgagccgagatcacgccattgcacaccaaccagggcaacagagtgagactccatctcaaaaaaaaaaaaaaagaaaaacaaagccatcttcattataaagtatattcctacttgtccacaattctagactaatttggtttgtctgtcttttcttgtgccaatgccacacttttcaaattactctagtattatgaggtttcatatccagcagggcaagtttcacctcactgtgctttgttgttgctgctactttcaccaccttcccagctattctagcacatttcctcttacacacaagcatcacagtcagcttgtcaggtcccagagaaattctggatgagaacacataaatattgaattcacagactgactaatgggagaacaggtacccttgtactcctgagtattcccatcctaaaacatgattatctatgtttatgtttcaggataacacaaatatttatgttatacataatatgggagtattttacatacatatggtagagaatattacatatgtataaaaatgtgtgccataatatataatttctatcttaattatgtataaaactcccatgacaaaaattttatatacacatatgcacatgtgcatgtatgtacatacactcttactttaagactggagttctattattacctaattgggtggttttaaaaaaatagaatttaaatataagatgaaaattatataattgtatacataaaaatataacagatgtaattttatatatataaaatctccacccatttaatactttattatgaaagttttaattttctttccatcatttcaatgtatttgggaagagggcaaattcaaaaaataattcagtatgacaaattgatcaatttcccagtttttatcagtatattttttatcaagttaggtttagaaaataaaattttctagggaattgtcattcaatctaactttaaaacaaaacttataggctggccacagtggctcacatctgtaatcccagcactttgggaagtcaagatcggaggatctcttaaggccaggtgttcaaggtcagcctgggcaatgaagccagacctatctctacaagaaaattaaaataataataataataattagttaggcggccaggtgtggtggctcatgcctataatcccagcactttgggaggccgaggcgggcggatcgcgaggtcaggagatcaagaccatcctggctaacacgctgaaaccccgtctctattaaaaatacaaaaaagtagctgggcgtgatggtgggtgcctgtagtcccagctactcgggagactgaggcaggagaatggcgtgaacctgggagttggagcttccagtgagccgagatcgggccactgcactccagcttgggcgacagagcaagcctctgtctcaaaaaaaaaaaaaaaaagaaaaaaataattaggcatggcggtacacacccatggtcccagctacctgggaggctgaggcaggaggatcacttgagcccaggaggtcaagactgcagtgagccatgattgtgccactgcactccagcctgggtgatacaatgaaactctgactcaaaaaataaaagaaaaaacgtatagaaagaactttaaggccaggtgtggtggctcatgcactttaggaggccaacgtgggcagatcacgaagtcaggagttcaaggccagcctggccaacatggtgaaatccagtctctactaaagatacaaaaaattagccaggcatggtggcacatgcctgtaaacccagctactcaggagactgaggcaagagaatcacttgaagctgggaggcggaggttgcagtgagctgagatggtgccactgcactccagcctgggtgaggggtccagactccagctcaaaaaaaaaaaaaaaaaaaaaaaagaacgaactttaaaaactgcatgtggtaccatgtaatatataaatattttaaataaatatatcatcctttctcctgatgtcacgtttcctgctgttgtgaaagctgaccaggagaagagtcagaagactgaccagctgtccctcagtctgttttctccttgctcccttccaaggcccaaggcatggaggtcagcaaatcttaaggattggaaggttgagattacccaactaacactgatttgacaggtgagaaacgtgaagatcagagaaagtcaataattcctccagtatcacaaaattgtctgtggcaaaatgggaaaaactaatgttttctgcaatgctttgtggctttctcagcaagtagtgaactaggaggagctgagatgttccgtgagaccagacattaaaaccacctgaggagctttctcctcatctatacatctgcaactgctccaggtggaaagggaaaagccaacatgtggcattgtggggagggttgatttttttagaaataaacattatatgcaggacttaagagtttttaaaagtaccacagaatacaaagtgaaaaatctcctcgcccttctcctccagctgctacccagttaccctcccagaaggcaaccaaagttactagtttctagagtgtcctttagaaatatcctacacatacatacactcaaactttttcccctatgtaaatggtggcatactagaaacacactgttctgtatcttgcttttattacttaatacatcttggttggcctggcgcggtggctcacacctgtaatcccagcactttgggaggctgaggcgggtggatcatgaggtcaggagatcaagatcatcctggctaacacagtgaaaccccgtctctattaaaaatacaaaaaagttagccaggcatggtggcgggtgcctgtagtcccagctactcaggaggctgaggtggggagaatggcatgaacccaggaggcagagcttgcagtgagccgagatcacatcaccaacctccagcctgggcgacagagggaggctccgtccccccaacaacaaaaaaatacatcttggcaattattctcatgcaactttggttctttctattgctaaagagtatttcactatatgggccaggcgtggtggctcacgcctgtaatcccagcactttgggaggttaaggcaggtggatcacctgaggtcgagagttcgagaccagcctgaccaacaagctgaaaccccgtctctattgaaaatacaaaaattagccaggcatggtggcacatgcctgtaatcccagctactcgagaggctgaggaaggataattgcttgaacccgggaggcaaaggttgcggtgagccgaaatcatgccattgcactccagcctgggcaacaagaatgaaactctgtccaaaaacaagagtatttcactatatgaacgttcatgcattttgtaaaagttttccaactaattctgatctgctgtcctaaaacatgctttaagtgatctatctctgtgctctcctcccaactcagacatcccaaataaataaagctataaatggaatgcagaggcaaaaaaaaaaaaaaaaagaaaagattttaacccagggtcatcccatttttttctaacagtggcctaaatgattagaaacccatgaggtacaattttttaatgcacattgtttaactttcagctatggtgagtcttgagttcaacaattacactcaatgtcactcaaagtcacaagttaagtgacttctccattttttccctcatctcagtaatccttcctgttgtcctagttttgtggtatgactttaatgaagtttaactttattatctcaaaaaaaaaaacaaaaaagtcagttttatttaaaagtactattcgcccaatacagaaggggaaaaaaaaaaaaaaaacactagcaaattcaggaaattagcccctactggcatacaaatttacaggtcaaagcaagcccttcctttcctcacatgaactgcagcctggagaccactacaacctccttcctcaaaacttatccacgagatacagggcaacagtgctcagatcttgttttttaaccagaaggttttcctcaaaagtcttaaatgaaagctaaatgtacaaaaggtacaatggagaaacattctgatctagtgagaatgggagacctaggattcatcttttcagtctccccctgcccttccccatccctccctccacccttcacttcagtcctggctcactaagatacctcggcagaatactttacatttgaaacccactgaaatgaaagaatctaaagttcagactgaaggggaagggagcaccttaagtggcagtatcaaattataatttcagttcttagcaccaaaactcattaactcagggtagttacatggttgactcatgaaccaaaaaaattctatgaattgtttaagaaatatgatcaagattttataagcaacttcctcatctcttaaatatcaacatataatgttttaggatgagaataatatagtaataattatgtcactgtcataaaagacaatagcacttctaactgaattatacagataaacccagaactagcctcttacatattgcaaacaggtaataccatattgcaaaatgaaattgatctatttaagttcctttttaaatcttctcatattaaataaacacacacatatttactcaacaggaaaatcttgcaacaacagaatttcaaatactatcctgccaaaaaacaagcaatttttcctctcagcaggaactcctggcttttggcccacaacctttgcataaacaaaatgtgttatgcaaaggtgttcaaggtggcctaagccatcttggaaaaaaagctaaaaatggccgggcacagtggctcacgcctgttatcccagcactttgggaggccaaggccggcagatcacaaggtcaggaaatcaagaccatcctggccaacatggtgaaactccatctctactaaaatacaaaaaaaaattagccggacatggtggtgcacacctgtagtcccagctactcgggagactgaggcaggggaatcgcttgaatccaggaagcagaggttgtagtgagctggcatcgtgccaccgcactccagcttgacaacagagcgagactccatctcaaaaaaaaaaaaaaagctaaaaatatacttcactgtggcaggaccgcagatgccacttcagatgagcaagaatgaatccaccaagcgtcacaatagaggtgaagcctacatttcaccaaagcagaaaaaggatcctacaaaacatgcaatttttaactgataaaataataaaacctcctgatacaaaagtatgtgatagggcaatgcctctatgacattcaaatgctaaaatattagttattaaactgaagcaaattaggtcacaccagttcccacaaagctgtccagctctagaccaattttaaaagtatgttaggcaagacaaggctaagaaggaccaccaccctgggcatcccgacacctaaaatcctccaacctggggataatttaaagaaagctgacctcctaaacttattacagagtccagcatccaggagaggaaagactagaaattatctaagtgaattctgtaatttgtacaagaccagagtggtgctatactggaataaattttctcctgtaaaataaactaaagcattcttccctttgaggggaaaaaaagctactgcttctcagacttttggttaagatctaacctgggggaatgccattgacaaggtattttatttgcagcctcttctgacatcatgacatcttacttaaagacagagaaacaaatggaagctaaagaaaaagctttttagttaacctatcctacctcttataaagtatgatattgaaagaaaaattttaataaggatacaattatttgataaatctatgggtacacatattcaataagtaattctggccaggcacagtggcttatgcctgtaatcccaacactttgggaggccgaggcaagtggatcactagaagccaggagtttgagaccagcctggccaaaaaggcgaaaccccttctacgctaaaaatacaaaaactaaccgggcgtggtggcacatgtctgtaatcccagctactcaggagactgagcatgagaatcacttgaactcaggaggtagaggttgcagtgagacaagatcgtgccactgcactccagcctgagcaacagaacaagactctatttcaaaaaataataaatacataattcttaaatgaaagaaaaatgatgctactttacctctacataaagtgctgtcccaagacaggagtacaatgtaacaatatccaactgagaactctgtgttatgtcggcactacactgaactaattctctgaactgaacaacactcactcactcaacttacaagaacaaatatatttcaaaaccagccaagcacagtggctcacgtctctaatcccagcactttgggaagcagaagaaggtggatcacttgaggtcaggagttcaagaccagtctggccaacctggtgaaaccttgtctctactaaaaatacaaaaaatatggctgggcatggtggctcacacctgtcatcccagcactttgggaggctgaggcgggaggatcacgaggtcaagagttcaagaccagcctgaccaacatgtgaaaccccatctctactaaaaatacaaaaattagccgggcatagtggcgtgcgcctgtaatcccagctacttgggaggctggggcaggagattcacttggacctgggaggcagaggttgcagtgagcagagatcacaccactgcattccagcctgggtgacagggtgagactccatctcaaaaaaaaaaaaaatacaaaaaattagccaggcgtggtggtgcacacctgtaatcccactactcaggaagctgaggcatgagaatcacttgaacctgggaggcagaggttgcagtgatccgaaatcgcacccctgcactccaggctgaccaacagagcaagacttcatctcaaaacaaacaaacaaaacaagaacaaataaatttcacaagcaaaatggatgactacatgccaattccctccttgattaacacaaaagaagaacaaagaaattaagataagaaaaattttaatgtagatatttggcctgaattaatagatataacaatatctaagtggatagtactaaaagagttaccatttattgagctctagatatatactaggcagtgtgctaagacttggtgtgtgcatgagctcacctaaaagtctggttccactattagctctaaggctgtagggaagctgcataacctcctcaagctatgtttttctaactcagagacagataccttaaagatcatctgctgctgcctcccctttgacccactaacagagactacaggttattaagcaatataaatcaagggttatgaacagactctgctttttgctgcacccccctcaacacccccgagctccacaaatcttaaagtcaaatgctcttagcctactttattttggtacacaccttagaaacaaacagaactatcaaacgcctgcgaaggcaaatatcagctctgttctgctctacacggcctctgcagcagctagcagtacttagctctcagtagcacccactccaacagcaagttgtttggctgttccttacacacacacacacacacacacacacacacacacgcacagactctgaagcttcccaggcctctccatctaactaccaccctccttacctcttgctgcaaaaactcctaactgggcttcccacttcaatactttctcaactcaaaaagccaagtgttctttttaaaccttaaatcggaacatgtcactctcctgcttcagattccccaaggatttcctacgcactgcaaataaagtctcaactacttacgatgacccaaggccctacttgatttggcctgcttactttctagattgctcactaggccccagcaacatgagtttcctttcagtttctttaggagcccttctctgccaggtccttcctagctgggccttcgtccttctttactctctgccaggaacgctgttcctggctcattcaggtggctagctcctcctcaaacttaaggtctcagttcaaatgtcatctcagaagagtctttccaaccatcctacatataaggtaagttcccacgagttactctcaatcacatcacccttttggttcctttacaggtctatcataatctgaaatggattacgtacttcattttatttgagtatattctgtcttctctcactagaataaaaactacctgtttgattctctataatatttgttgaataaaataaacaaactcccattcatgggtctgatattttttaaaataaataaacaagaaatatacaagacttatttgtacaggacttatttgaagcaaagtttgaaaatctactgagagacataaaaatctattagaacacaggacagtaagtacataaagatgtcaatttccccaaacttcacctacaatttcagtattcccaatcaatattcagtatgtaataaaaatctctatgatttctttttgaatgtcacagaatgattctaaagttcatctagaagaacacatagaccagaaatgtcaaagtctgaaaaaaaagagtaatgaacaggtaactaaccccatctgtattaaaattataaaatgatagtaatttaaagtgtatggtaatacacaagagaccaaaataacaagaccaatcagaaatagtcccaaacacatttagtaaatgacaaaagctgcaattctaatagtggggcaaaaaacagattattcactaaatggtgctgacacaactagctagttggggtagaattcacacacaattttatcccccaaaatatgtctcacttcttataccagaagtaaattccagatggatcaaagaattagaagttttaaaaagagaaggaaaaggaaaaaaagaaaccattgaagtattaaatacaatctggggacttctttgttttaaaaatacaaaaacgcatgcagttaaaaagtcttcctctcactcattcttcttactatgacaaccaatgtttccaagtatcatatatcctgtgatatacaagcaaaaatgtatacgttgtttttcatctttaaagcaaagacacatagaggcatataatgttcctcactttgtttttctagtttagtagataggcgaatattttatgttttggagcaaggaaagtcttaagtagagcacaaaacacaaaagtcacataaataaattaacaagagtcacagctaacatttattatttacttactttgtgccatccactatgcctaatgctatttacattatctccattttacaaacaaggaaatgaaggtgtacagaggttaaataatgtgcccacgttcccacagcagcacagtgctgggtttggatttatctgactacataacattacaaaagaatagctagggggatatgtgcacacgtatgaaaaaagtgaataaagccaggcacgttggctcacgcctgtaatcccaacaacactttgggaggcctaggcaggcagatcacctgaagtcgggagtttcagaccagcctgaccaacatggagaaaccccacgtctagtaaaaaaacaaaattagccaggcatggtggcgcaggcctgtaaccccagctactcaggaggctgaggcaggagaatcacttgaacccgggaggcggaggttgaggtgagctgaaatcacgccattgcagtctagcctgggcaacaagagcaaaactctgtctcaaaaaaaaaaaaaaaagaaaagaaaagaaaaagaaagaaaaaaagtgaatatgtagagaacttttaacctgttaaaaaccagtagccccatcagaaaataaacaaagagcaaaagtaggcaatttataaaagacatatggccaagcgcagtgacgcacacctgtaatcccagccttcaggaggctgaggtgggtggatcacctgaggtcaggagtacaagaccagcctgactaacatggtgaaatcccatctctactaaatacataaattagctgggagtggtggcagatgcctgtaatcccagctacttgggaggctgaggcaggagaatcgcttgaacatgggaggcggagtttgcagtgagccgagatcctgccactgcactccagcctgggtaacaagagcgagtctctgtcttaaaaaaaaaaaaaaaaaaaaaaggccaggtgcggtggcttacgtctgtaatccccagcactttgggaggccaaggtgggtagatcacctgaggttgagagtttgagaccagcctggccaatatggagaaaccccatgtctactaaaaatataaaattagccaggagtggtggtgcatgcctataatcccagctactagggaggatgaggcaggagaattgcttgaacccaggattcagaggttgcagtgagctgagatcaagccattgcactctagcctggacaacaagagcaacactccgtttcaaaaaaaaaaaaaaaaaagaaagaaagaaagaaatacaactctctccatattaaaaaaagttcagcctcaatagtgattgataaaacaccaatcagaatcacattttttcagttcctaaattgtcaaaatgttttaaactgtaatatctagtattggccagggtatggggcatacctgaatactattggtagctttacaaattggtacaacaaccatttggaaggaaaatgtataaatatctatccatatctacattattcacatcttttgatttgaattcaaatcaaaagtggagttgatttcagcaactccacttataggaatctatcctacaaagctgtttgtacaaatacacaagatacatatacatatgtacatgtgcataaatattcatacacacacacacaattgtttacagctttgtttttctggcagaaaaaaaaatccagtgaccataagttgattaagcaaattatggtattttctttttttttgtttgaaacagagtctcactctgtcgcccaggctggaattcagtggcatggctcactgcaatctcctcctcccagtttcaagtgattctcctgcctcagcctcccaagtagctgggattacaggcacatgccaccatgccttgctaatttttgtatttttagtagaaatggagtttcaccatgttggccaggctggtcttgaactcctgacctccggtgatccagccacctcagcctcccaaagtactgggacaacaggagtgagtcaccgtgcctggcaaattatggtattttcatgtactagaaatgagttattaagttgctgttaatgattgataaaggtaactcggaaataaatagacaaacttggaacagtagtatacaaaagaatagtatattatgattccataatatagaaaactatacaaacacagaaaaaaaactggaagaatatgcaacaaacgcagtagattacatccaggaagtggttctttcaatttcagtatatataaaaaataatgtattacttataattagtgaaagataagattttaaaatagcatatcctccttcatgcattaaaatgattttatgtgaatataaagtaacttctttctcccccctcaacaggatgtttatactcctacatcaggtatattaacgttctgcatattttaggttataactcctagatagcataagttttgatttcattccaaatacctccaaatacataaaagttattctaattaaaaatgaatttaaaaatcttaaaagtaatgcaaagttaaacatctttgaacagaaactcaaagtcatgatgatgactacttaaacattttcaaagttacataaatctctatgttattgccaagggaaatgaattgcctaaaacaaattactctgaatgcgaacagtgtatgacagtgataatggcaagaagaatgtctgtcagttcaaccaagaatggggtaaaggggcaatctataagcataaaggtgactctcatcataaatctgagtcgaattttcctagaaaaatgtaaccttcgccaggtgcggtggctcactcctgtaatcccagcactttgggaggccaaggcaggcagatcacgaggtcaggagatcaagaccatcctggctaacatggtgaaaccctgtctctactaaaaatagaaaaaattagccaggcatggtggcgggcacctgtagtcccagctactctggaggctgaggcaggagaatggcgtgaacctgggaggtggagcttgcagtgagccgagaccatgccactgcactccagcctgggtgagagcgagactccgtctcaaaaaaaaaataagaaaggaaagaaaaatataacctcaatatatttggttttgatatcagtttattcgtgtataacaaagaataaaaacagccaaacagcccaaattttgttcctcgagtacgctgtaatgggggaaagaaatccaaataagttgggaatcttgacttttcctttactcctgactaatctacttaagaatttaattttttatataaactagtcaatattattctttcaaagggagtcctaaattctattataatcaaccaactgttccatatttctttttttttttttttttttgagatgggagtctcactctgtcgccaggctggagtgcagtggcacaatcttggttcactgcaacctctgcctcccaggtttaagcgattctcctgcctcagcctcccgagtagctgggactataggcgcatgccaccatgcacagctagtttttttttttttttttttttgtatttttagtagagatggggtttcaccatgttgcccaaaatggtctcgatctcttgacctcgtgatccgcctgcctcggcctcccaaagtgctgggattacaggcatgagccaccgtgccggccaatcttcccatatttctaactcccagttttttcctaggattgaaactactccaaaatttcctgcatatataaattaaaacattattgcattctaatattatctagaaccatgagtgctgtctaggatgaaccaatcccatatttactttctcttcctcccccaaatcccaataaacagaatttttttttcttttttaaagaaatgcttttaactgggctcagtggcccacacctataatcccagcacttcaggaggccaaggtgggaggatcacttgagcccagcaatttgaggtcagcctgggcaacataatgagactctgtttctacaaaataaaagaaattgaccaggtgtggtggcacacacctgtagtcccagctactcaggaggaccgtgtgaacccaggactcggaggctgcactgaactatgatcacaccactactctccagcctgggcaacagagagagactttctctgtaaaaaggaaaaaaaaataaatattttgatgatttactaattacagctatgttagtcactgccattggtgaaatttctacctgttttttaatttccaaaaactattcagcatcaaactgccatatgtgtatcagacatcttctacagcatccacactaactctagctgcaaagctcttttatgcattcaacaagtatctgctactcccgggcacaaggtgttattctgggagtgggaaaagaggaaatgaaatttaaaaactcagatacagacatgcctacaaagggcttatggtctagaggcaaaggatcaagagtttctagaaaaataatatacattttggagaagagggaacaggagagacatttcctggatgatgtaatatgtgatcaaacccttgaaaaataggataaatttagatgtagtagagtttggaagataagggaggaaaggagtattccagaaacaagcatagtaagaagaaaaaacaaacaaaaaattcttcttaatacaacacaaaatagcccaagtagaataaagaaatatgccatgcttcagtatttatgtaaagattatcagcttaataaaaatataccttttcctttacaataaattttataggccgggcatggtggctcatgcctgtaatcccagcactttgggaggccatggtgggaggattacttgagcccagaattcaaaaccaggctgggcaaaacaatcagaccacatctctatttttaaaaaattaaaatgaaacaaaataaattttatagcatgcatacatacagaaaatattacaaatgagctttttgatgtaaaaaaaattcataaagaatacagtcggccaagtgcgatggctcacgcctgtaatcccaacactttgggagaccaaggcgggcagatcacttgaggccaggagttcgagatcagcctggacaacatgatgaaactccgtctctaaaaatacaaaaattagccaggcatggtgtcatatgcctgtaatcccagctacttgggaggctgagcacgagaatagcttgaacctgggaagtggaggttgcagtgagctgagattgtgccactgcactccagcttgggcaacagagcaagattctgtcaaaaaaaaaattcatgtttgtgctatttatctaagcttttatattaatataacaattgaaatccttcatacttaaaaaaaaatccagaagtaggcaaaacaaacaacagctaatttataaaataatttaacctatttgtaggccaggtgcagtggcccatgcctgtaatcccagcactctgggaggccgaggcaggaggatcacctgaggtcaggagttcgagaccagcctgaccaatacagagaaacgctgtttctactaaaaaatgattttaacactgtcttcatttcccaaagattactgaagtcacatgaaataaaaggcattagagattctatttttctgacaaaatatttaagagccttccttttcttctaagccaagtaattagggctcctttatatatacatcatatacacaacacttctagacaggaaaagatctagcagtggtaagtttttctttctcattttatgaaccctaacacaaattccacagaccatctatgacatgaactttctgacttttcctgtatttccctctttcataattagtcattctactttaggacaaaaatttgccatacaagatcctctctcatataacatttctttccatcataacttttcttaccatccataaatacatcttcatatccacaactttctttagatctctctccccgactgatttctgatgcccacccaaacctaaaaggtcagataacgcaaaacaaaacagaggagagccttagattttgagagagacctgtctgcctgaagttgttggggttccatgaggacaacagaggtttctcctaagatgggttttgtagcaccttctgtttttctttaaggagtcccagcctgtcagaaattaccttagatcctctcatgtgggcactgagtggcaacaagacagactagggaacagtggcaacaaggcagactagggaacagatggcaacaagacacacaactgagcagaaaaagaaaaacttactacagtccctactgtaaagatggataaactgaggcagcatgaagtttaaaaattcatgttacatagagttgggctccacagctcactctcttaagcatcctgtaattttgctgaatctatgcccagtcactgatgcacctgtatggtacctcatggcccccttagagcttagaacctgggtttcattcctgctctacagctatataatttaacaattttcctctgaatttgttggattctaaccctatatttctaaaattttattaatattactgaatcttaaagggagctgtgatgtctttagtctttagaaatgttaaatctataaacaaagaactatatgcagttaaactgtattcaaatttctacatgctttaaaacactgaggcaaagtattaagaaacacacctaagaaactgcaaccaatctactctggacaaaaatttaggtactatctctccaaaataagctacctagtggtatttatacatattcttccatataccaacagtatcttacatgctcatagccttaaaaataactaaagtgtcagaattataggcattacacatttctgttggcttgaaaaatgatacaaaatgcataaacttctagaatgatcagtttaataaaagagttcataccaaaggtaataatactaggaatcaaagagggctaaacactgcaggttcttaaaggcgaaagttaataaaaccttgtttttggttgtgaatgtttgccttacaacattatacacgattctcccctctctttttcctcttgcaaagatgtggtgatgaaccctttgctcatgcagatgacaatactcttgaaaatggtggcagaaaaaaaaatgaagggaatatggttcacttaatcatctcataaattagaacttattacccctgtgactcttggatagctccagaaaaaaatatgtgactgagatgaaatggctgtttgctaccaatactttatgtgatgcttcatttttttgattccttgaataacacaacacattagtccatttatgccagaggttgcaattttttgaatttttgcataagtgaaaaatcagaccttgtcgatgacatttaacaggaggatataaataatttccacatgcttagcatggaacactaggcataagtgggctaacacaattatgaaagcatagctattcaagtaactaattatacaactgatttttttttcctcatctctaaaacatagtaagggatcagttatttaaaaaacacaacagtgacaagtattttatttttaactcagttttggtttgttaaggctattgcttggcataaaaatacaaaaacaggaggagaaacaagaatacaaacatgaaatagaagcagtagcaaaagaaaatgaagaggaacaagaaaatgcaaagaaaatacacaatggaagaaaggaaaaagaacaggtgtgggaattagaaggcctatcatatgacactttttatcccctcctcgattcataaaatttcagtaactccaagagtatcacaacaaaaaacaagcaaaaggatacacaaatagtcaccctctaaattttgttaagaatgagataatgctgccactcacgcctaactctggcaccagcaggaggagggcacactccagagattgcagaagggggaggactcctctttgccctaggtgtaccaccaccactgccaccgaggccttcgttacagcacccacaggttcctcccctccccagaacgggatgggccctgcagtgctcctactcccccttcccggcccccagacttcctactgctaccaccactagtgccgatgccaatacaagcagtcatcctcaacgtaccagcccaccctaccaggatcctaccaccaggcccccgtgggtgcccttctaccgctccagtcgagctgtggtctccatctccaacaccaactgcatgaggcaagctgcagagccacgtcatctgctcgaccttaccacaggcggcgactccttctcctccttcagcctggcttggagcagctgggcaggcaaagcaagaaaaacccaaaacaggactcagggattggaaccattagagcctcacctcgttatgctggtgactgggtgtcagggatcagtttcattgaagacactcacacccaccttccaaagtccaacctctccttctggcaaaagctggccaggaactggggcctggggtgggagtaagtgcctttactgaaaccggcccctggccaagtccagctggccaggaattgctgggcccaccaaggctgccctcctccaggagcctgagtannnnnnnnnnnnnnnnnnnnnnnnnnnnnnnnnnnnnnnnnnnnnnnnnnnnnnnnnnnnnnnnnnnnnnnnnnnnnnnnnnnnnnnnnnnnnnnnnnnnnnnnnnnnnnnnnnnnnnnnnnnnnnnnnnnnnnnnnnnnnnnnnnnnnnnnnnnnnnnnnnnnnnnnnnnnnnnnnnnnnnnnnnnnnnnnnnnnnnnnnnnnnnnnnnnnnnnnnnnnnnaagaaaccacagtgggtgtggaggccctaccgtgcaatccagctcgagtggagaaaatcgccttctagagtctggagtccgagaagaggaaaacgatcccttacttggaagctacgagaagaaggaggccactgttgttgctgcccctgccacctcctcagcttgccaatgccgctggcagtgtagcccccatggcacccctaatctgccccctgccactagcagtgtagcccccggatagcacatccaacacaccctacagtttcaggcaatgtaaccccaatacccccctgcaaaagcccccccccacacacctcagggagcataccacccaatagtgcccacaatctgacccagccacgggcagttcagctcctaatggtgcaccccccagtcacagacagtgcagcacccaataacgcccctaaaccaccccccactgccagcactgtagccccggataactccacccaacccactccttgccgcgggcagtgcagcagaagatagcgcccctaatccttccccagccaccagcaatacaagctagtgtacacaatctgcctccccccacccaccctgccaccacgggcagtatagccccagatagccaggcaacctgccccaccaccagcagtgcaaccccagagagtgccccaaaccagaccactgccacaggcagggtagcctctagcagtgaaccccaataggacacccaacccttgccccccgaggcacacagggcaggcccagaaatctcacctaccccatcacatttctaccactgtggttgagctgcagtctccgacgtcaccaccaaccacagcgaggcgagccatggtggcacaggttccagcctccagcatgtggcagtgcctcttccttctagtcctcctgctgctgctgaccgctctcctactgctctatcgctaccaccaacctcagcgaggtagtgacctaggctccaagctccatccatcctccatcctccagcaggcggaaggttgcggcctcttccagtcctctaagctggacacagagttgctcctccgctcgacacagaagagcctgaaacgacctgacaccacctcagcatgctttatatatgaggttatgcaaacgcagttcctggactacatgttctgattggatgagaaaaaaaacctctaggcctactctgattggactttattttcatgctgtgattggttgtgttaagacttgctctcatccaatcagaacatgatcattcccattcctgacacctccacccacagtgccctgtctcccacttcccccgcagtatataaatgatgctgaagcggcaacacgttttttcaagttcctgtatcttcatgtcgagttgctagctgcccaacgtagaggactaggaatcaggagtcggtggccgtatgctggaggctggagccgcgggagtgcagctcgcctcgctgcggttgttggcagtgagggagagagagtagcgcggctggagcgggtaggcgaaggaaaacagttttgggatagatagaggggagtaaagagggtagttagggccaaagggaaaaaaggatagcttagccggagaaggcattgcaaaaagatggcagcgaaaagatggtggggaaaaaagtttttgggtagatggaggtgtaaaaaacagggtggggagcgggagggaaggaaggttttgcagaaagacggtaggtaaaaagtttaagggtagatggagggggaaaagagggtggcaggtgggcggaggaaagagagggaggtgatgggggaaaacggggcgagcagtaggcagagaaggttttgtgaaaagatagtggggagaacatacagtgaggggggaaagtttttgggttgagcaaaagagggtagcaagtgggagaaggaaaaagagggtagccagcaggaggaagacaaggttttgtgaaaagacagtggcagaaaagaaagacggtgaagaaagaaaagacgggggtgaaaagtgttttgatagatggaggggggaaagaggataatgaggaggaaagagggtggcgacaggtagcagggatgggggttgggaaaacaacggaaaaatagtttggggtagagggaggggaaaaagggtggcaagcaggataggggaaaaaagcactagtggtaaaggggggagactttgaaaagatggtggggaaagttttggggtgtagatggagggggaaagagggaggtgaatagccgtggggagaaggctttgtgaaaagacggagggaaatgtttttgggtagatggagaagcgaaagagaatggcaaggaggaacggggaaagacgatgaagaaaacagtttttggttggatgaagcagggaaagagggtagtgagcagcaggagtggagagaaggttttgggaaaagacgggggaaaatgtttttgcttagataaaggagcaaaagagggtgatgagagcgggacggggaaaaagagggtggccaggggtaaggggaaaagagggtgggaagaaactggggaaagggtttgggtagatggatggggaaaagggtgttgagcaggagagtagaggcggctttgtgaaatgagggtgggcaaaaaatgatgaagaagtttgggggcagatggtgaaagaaaaagggtggtgagagggagggggccaaaggccgtttggaaaagaaggtagggaaataatggtgggggacaaaggtttggggtagtttttttgataagatcatttgtatgtttgcttttcagtagtttgagttctttatgtattttgtgtatgaaccccttgcctgatgcatggtttgcaaatacttgcttccattatctgggtggtttcatttttattaaattttaattcagtttaattttttttaggcagagtctcggtctgtcgcccaggttggagtgcagtggcacgatctctgctcactgcaagctctgcctcctgggttcacgccattttcctgccttggcctcccgagtagctgggactacaggcgcctgccaccacgccaggacactttttttgtatttttagtagagacggggtttcaccatgttttccaggatggtcttgatctcctggcctcatgatcggcgcgcctcagcctcccaaagtgctgggtgtacaggcgtgagccaccgcgcccggcctgttttttcattctactgattgcttcctctgctttgcagaagctttttttttttttttttttttgagacggagtcttgctctgtcgcccaggctggaatgcagtggcatggtctcagctcactgtaagctccgactcccgggttcacgccattctcctgcctcagcctcccgaatagctgggactgcaggcgcaggctaccaagcccggctaattttttgtatttttagtggagacggggtttcaccgtgttagccaggatggtctcaatctcgtgaactcgtgatccgcccgcctcggcctcaaaaagtgctgggattacaggcgtgagccactgagaccggcctggaaacctaactttattttttagtgtagtatttgtatatatactttaatagccctgagttttaataaagttgcttttaaaaatgtatcttatatttcagaaatataccctaagtcatgtgattagttgggtggcatgttgtttagtttttacaattgaaggattgtcattcctttgtacaaaaaaaaaaaagtgaatttttatcatatactagaggaaagaaggcagatactaaataataaatattgtatgcttccacgtaaataaaatttgaaattatataaagacagaatgcattgaacttttctggggttgaagtggggaattcattggcaaaggtcgtgcaataaatgtgtaggtgaagggaatattctatatttgattgtgtaggtgattagctttataaatttgtaaaactgaactggactaaaatgtgtgccttatacgcagattattctataaaattgattaaaactagttagaagagaatcagtcaaggggaaaagaaagaaaaggcacgtgaaaaaataatgccaatgcactagaattgtctttgatgacattaaatatagcctggtcttctgttaattctttttaaaatttacgtagatttctcaatcctttgatactttttcctcagcacatcttatattctcatatatgttaatgtatggctacataagagagggctctcttacagttggacttggaacagcttgatatttatatctagagatgcatcggaagcataacactgacccgtgagcaagatgaaaatggcatgtgctagttagtgattcataatgtgttgctttaagtttagtgccaactggtctacatcgttgagaatgtttagtttgatagtttacacaacttggcttaggaagtatataaccaacaatgtatgagggagcctgctgtaaagacttttctgcacttccctttaattattatagtaagctcaaatcttgaaggttcataatatacagacaaaatgtgtccgtgagactgagaaaggatctttagggagaaaggctctgttcctgaaagacagactttcaatgatttcctgcattttatttctgttgtactttacatttacctttattaaacactaataaggtggttcttatagggcctcataggcctttttagttttccaacctattcatacttggtgcaaacctagtaattttttgcgtgatagtattgggattttactcggaggctaggcttcacactgtaaaaacagctttttggaattgtatcattttcagtctttgcatcgtgttccactgtcccagccacacacacacacacacaccagatatgaagactacaagcatcctcaaaaggtgtaacacatctatagtagatgtttttacctcttgtaaaatctaaggaaaatatactaaaagtgaaggcatcagtaaaacagtatcattttaggttgacctcgagtatttcaacatcagtctagcttcagaacaatacatttgcaaggggaaatggggtacttttgtggttttttacacctgttatttcaactgaaattgaaaaaaactattttgaactaactataaccatgaaaagaagcttttatcagtattgaaataaaataacaaaatgcatttgtgggtctgacctcaagacgcattttaaatagtcaatactacctctaactctcattcccctttctctgagcatcagctttattcttattccatcttacttaatttggcactgacagatacagactcattcttacaacatataccatcagaagtgaaaccttcacactctccaactcttgaaaaatctgagatgcactttgactattctcagatcatggatctattacttggatcaaaaagtactgcacagggaagtagatactatgatctctgacattacagtttcaaggctggagtgagaaagggatagctccctaatgagggagtatcatagaaatgatattttcatggtcatacttttgtgaactaggcagacatcccttcatgtcaactacatctctactttgaacagataaatatccatgcatatacaaaattatatagtaatataagcatgacttttcattaaaattgtaaccaaaacagtctaggtgaataaataccaatacaggagatagttttgcttgaatgatctttacccttggggagacatacataaaagaatgtcatactttgttatgaaatgactgtccaccatatttatgagtaaactttcataatttctttattgtctaaagtaagcacaaaaacccttttaattaatatccctttttaatatatagaataaatataagaaaatagcacaaatggtattatgccagcacatagaaacagtttctgttaaaagtcaatcctgtattttgagaacttgacaaaatcataattgaaaatagtgtattgtcttacatgcagatgttgtgtaatcagggacatccaaatcaacttacatccaaatatttcacaattagtcttattctgtgaagtattataaaaccacgctctcaggaatataaaagcacaaagggagccaggactccaaatagccatttattcatttcctaaggttaggtacaatgaggactgcattttcaacattatcagggccatacagacattggagcttaaggataagatccaatttcatagcagtctgttaaaggataagccagtgtaatgacccaagtgttcaccataataattaccatcttgagtgttgatgctatgaatagaaaggaacactgcatctctaaaattaactatggtttatatgacatgagaccaatttgatggaaagaaggcgaactgtgaatggtaattttgtttttttagttgttttcattgtgtgtactcatatctgaaaatacaataccatataattagaaaagttataacaaaataagactggaagccttaactttttatatcaaatgttctgcacacaaatatagccttttactgatgatctatggctccaaaatattggtagctataattatgctttgtaaaacagaagctatgaatgccttactgcagaaagacacaaagaatcatttccttactcactcactgctagtagaccctgatgcacagcatttcctgcccagatacctgattattaatccagtttttgttaggggtatactaacattaactaacggagattggtgtttaaaccagttaatgtaaagaaatgctgtaggaactgaaatattccttttaaattaacaaaagtgttctttctagataaagttacatgaggacccaaatgtataccagaaaatcatttgatgaatatggaattaataaaagaatgttttgttatatggttttagtactttgttggtgccaggttaaagacatgtggccctagataggataactctacagaagagaatttaatttgtttacctgcttcactagaaatccaacaattaaggcagtgactctattttccaatattcatttcctccattttctcatctctttttgattgatggtatcatttcgttatttcattttcattgacatggaattcattttggctaaaatgactttttgactgtgtgtgtgtatatatatatatatatatttatgattttaaaatcaatgaacaatattgtttctctgtttccaagattatccctctatattctctaaagtagatactgtgaaacagtccagataatgagtctaggaatggcagtacgaaatgctgtaaaactggaagcaacttagtaggtaatcaatagggaaaatgaaaatataattgactctagttaatgtaatgatgcatttattttacatttttcttgccttcctgagataagtcctgcctggttatagtatattatatgttttatgtattgctgaattttgatcattagcattttgctgaggattttttccatctatttttgttaaagatattgttctgtgttttttttttgttttttttttttgatgctattgtctggttttgttactagggtaatactagcttcacagaataaactgggaagtgtattctctttcttttttttcaagagtttgtaaataattgtattaattcaactttgaaagtttggtagaggcattcttggctagaatttgttgctgttgtcattgtttcctgagctggtggttttgattactaactttatctctttacttgataagattttatatttctccttgactcatttttgctaatttgaacctttccttaaaatttgtccggttcttaaaaaatatctaaattttagatataattgttcataggtacttttataataattttttatttaagtttagtgtccttttaaaattttcattaatacttgaatagtttctctttcttgttggtcggtctgtctaaattgtggccactgttgatgtgttcaaagaaacaatttttggctttgttgaggttctcaattgtttttctattttgtatttcactaatttgtatatccctaatactttcttgtggttgctgtagttttaatttgctcttcttttttcagtgccttatggtggcaggttagagaatgttatttttgagtatgagaactacttttattgcatcacataagagatattatgcattcttaaagtattttatctttttttaaagtattttctaatttatcttattctttttggacccattggttatttaatagcatgttgtttaatttccacataattctgagtttcccaaattttcctattgctgatttattattttactcaattattgtctgaaaatatactttgtattattccaatgtttaaattcattgaggtctattttatggcctgggatatggtattcctggataatgttgcgtgtgcacttgagaatctactgttgttacagtgttctttaaatgtctaatcactctagttattttatagtattgttcaagtgttctatttctttgttgatcttttgcctagtcattttatccatttgtgaaagtattaaaggctgcaagaagtatgttaaattgtctaaagttcatttttggaggtttctatgtcaatggattttgaagtcttttcatcacacatatgtatgcttgtaattatttatttttgagatattggcccttttatttttatgaaatatctctctttacctctgtaaccccttttgttttaaagtgtatttttttctgatattaatgtaacaattccagctttcttgtggttactgcctgcatcgtataacttttctatcgttttttttctatgaattttcatctttggatctgaagtgtgtcttctgcagacaacatgtagatggatcttgtttatttaatttgttttacctccagtctgacaatcttttatttgaatatttaaattcattttcacttgaggttactagtatagatttacatccatcattttacttcagttttctgtataccttatgtcttttcattcctctattcctcctttactgctttcttttgaattaggtattttttataaaacatttaatttaaatttaataatattttatctatattttttcaatgtttcccttaattgttactttagggtttactgtagacatcttaacacaatcaattttaggtgcataacaattctagtggcatatatgtatatataaattttacttttgttcacttttgtgtactttggctctcctttttgtgctattatggttgtacacattacatctatatatgctatgtacccaataatttattgttataactgttacttgatatggtttgtttcgtcctctccaaagttcatgttgaaacttaatttcaatgtgacagcattaagagctggaaccttgaggatatgattagggtattagggctctgtcctcatggatgatatgagtgtgttacagaagggctggagggaattaggacattaggaccctttgccttttcatccttttcactgtatgaatatacagcattcaccccctctggaggatggagtattcaaggcacctcagcagacaccaaacctgccagcaaattgatctttaaattccagcctgcagaactatgagaaataaatttctttacaaatttctcagtctctggtatatatatatgtatcagcatgaacagactaacacacttgacataattttatgtcttaaaaagataaaaagaaacgtactatgtatttacggcttttgttatattagcagtcttatttattatttcaggtcttttcatttgttcagcatttgaaacttcttcctgacaccagaagggctcttcttagctgtctttttcctgggttattcctggtaaactagctgacctttgtttcaaagcatatgtctctaataaagtgccagtctctcttatttgctttttaccatcacttcattgtttttcgaagtacccttatggttgaatttccccaaactcttcttttgggaaaagctttacactctctgctgtatgttctgccccttcctttgggcaaaacttctgagctttggctctggtgattgcagcaaagagagcagcattctcctctcggagtgacagccctacttcgagactgggtcactgggatgagaagtagcctttggtaatctcagcttgccactcctggaatgagaactttgccttacagacaaaccagaaagaaggcaatcagggctcagtgttctcagtgtgttgcacctaaacagtcctcattccatgaattagagctggtaggaagaagtgacatcctacttcttggccacattcaacaaaagcttaacctcaagaaaaggtagtggcagcaggtgggggttgaaatgaaaaattctgatgtactgttactcccagaaagatactatatccccccaatggggtctagtaaaaatcctgtgtttttggctacattgccttgagtagagtttatatcaagataggctgtgagaaagagaggtaagaatgggttgtggatcaaatgcaaaaaaactctcactgttcttagtgagtttcagtagattttcttgaataaatacttcatcattttctatgtaccattatgacttttcaagtgacataggtgatggttgttttataattttcaacaattttataaaagatccatggaactcttcacattgcctttctagaggtggaacttctgcatttatttcttatgcaaggaaattcttctgaaatatactttggaatctcactctctacagcaaattgggtctcagtgtatttctttctccaagagaagtctgctagatactcaaataatttttgttttatattgttatgtttgaaaggttgttttgttgttaaacaaaagacaataggaagatcaacatgaaaccctcacattcattgtatgaatattatcttttcattcagaaagagttaaaatatatttgagtgctcataaagctttaaaaagaagtggattaagtaatcaatctccctaggcagataaaaaagcacatgatattttggtattccccaacttttattatttaactttcatgttctagcaaataactttcaacaatttgtcaacttatttgcagtcatttatattttatattattaattccattatttatgcatgtgttgaatagacttaaatatatagagtagatgttgacactcgaatttgtaacaaagtgaaaaattactttgatacgtatttctttttttctgacaaaattctgaagtgcttttccatctcttctaagacaacatatagaaaacgtatttttttctcattattaaatatatgactcggaatacagcaaaactaattggctataaagcaaacctttaaaagagaagagtttgatgaaaaatacaagcattcttagttatacgtaagatcccacagagccaactttttccagatttatgtcccaattttaaactttaattcctactgtctaagcattgtggctaaaagtatgagataattaattactcctgacatccaacttttgtgatcacagtaggtgacattcctttgaaaaaaataacttgaaaattttctggtaaatgttacgtttgtgtgtgggtgcagagtttcattttcataccaagctcacatatcaaagttgagtgttttaattatcttttaagactatgtccttggatgctatgctatatgccaatatttatatatgttgaatatacttaactttcatttaacttacatagacatagtgcttaactttaatcagagattcctaattctgatgaatgttggtagaaaatatgctgcaaataaaatatgttagaataatttttaataaaaggataaaaggaaagaagctagcagaagagccagcaccacagaaagcaaagtcacattctggatccaagcaatgtttccatgagcaaagaaccagcaaattgaattcacgagacagggagcagaagcaagagagtgaagaggaagtagacttctttttgtttttgtgtcttatttgctttctcatgagaagagtgtactagtagtagaagtaagttctatgaatgagaccagaaagacgtaggtagaatatctggaccctctgtataggataggtagttattatattgtgtgttctggaggtaagatttatataatttatataattttatgaaatttatgaatttatataaattatatgaatttacataaattatatgaatttttataaattatataaattatatgaatttatataaattcaagcccacaatagtatcaaggcctattaagcaaacatccattagacagcaagaaagactaaggctttcaaacaagcgtcaatagttaaatgtgaagcaaacatacagacatttgatactgtgacaaaaataatgaggtttatcataatatattttcttgtttagtaattatatatagctacatactagtttttcaaaacttaactaattctctttaaatatatttctatgaaatttcttgctatacttgggatacagttgagtgtaaactcattttgtaggatttttttttttaaatcatgaaacaacatagtgataaatttaaatagttttgccagttgaatcatgtatgtgataaaaaggctttatatttctgattcctaaatcagggcatggcagtacaaatcataaatcaagtattcttatgtctgttgtataattatagaagaataatgcccaaaccttttttgaatgagggtatgtcatgagcatcaaaaggggaaaaaaagtatgaaaatccgtgagagttttactctggagagtcatatagattgtgtgttctttagctaacattttaaaacaaatatctgaaatcacttgcttaacccctttgaataatatatattattgcccttaagagaaatttggtaatctactaaaggtccgtttcatatagccctgacgtctctctccagtcacgtgcccttactggtgtctatgacccaaacacactagtcgtctctcaatttcactaagatgttttgcattcttctcacagcttttatgtctgttgctgcttcttcaaggcatacttatctgatatttactagctactgtctattatcttgaatcagcttaatggtttattttcgaggagacaagggcaaattttgctgctctatattcccatagtattgtggtcttctctttattaaaaactcatcgggctaaaaattgtttgtgattcccatttatttacttgctagattctgaattccatgaggactggaaatgcaacacttttatttacctgtgtatctcaaactttgtattcttcctgtgagacagtcatgtatttataaaaatgaatgaaatttttgtgtctatagactgcattaccaatacctcttgcactatgaaattttctttaatttcaaaaaatccaaacattatttttttctcgtttatatagtttgaaattcttttctggcaataatgtttcacctataaaaagacctattaaaatttatttaatactaaggggagggataaaataactatgcatttttggtcgaaagcacagttgtgtctgatactttaattatgctgtctaatttaacttttcataaatacccagaatatcattcatgatttaaataccaactgccaaaatgtacagctatcaagtggaagactcagctttgtgctatgccgcattttctcttctttcctttttgtgatgatcttccaaattgtggagaaagaaaacatttctatttgtgattgtttctgctagttatttctgcaaaacaaactactcaaattcagtggcatgatgcaataaccattttgtcatcatatattctggggtcagggggttgaaaatgcaaagtggggtgacatttctgtggtctacagtatttggggcctctgagaagtcctagatgtctaggaatgaattaaacgttggacaatgaaatcttctgaaagcctcttcatttacatgtttggctcctgcattgttatgacttaaaggctgggctcaaaataatctcttaaccagagtgtctgaatattgcttcttcatgtaacttgggcttcctcacagcatggaatcatacaggtagtttgcctgagtgtttcagttaatgggtcaatgtattgcctttaataatcttgcctcagaagtcacatagaattactttaatgctcagttggtttaagcaatcacagcctgtctcacggggaagaaacatgatgtctaccctttgatgtgaggacattcaaagtattcgtagctatattttaaaaatgccacagttatcttctttttaaagagataccatatctttattatcagctatagaatcaggatttgaaaatagttcttatgctacatatgcatttttgttatcattcttgttgttataatcttttacaggaagggtgaaggggtaagggttatgtttcattctttctcaaattttgtgctctataagtatttttattttttgtccataatagattgtggtacaaaggtgactcaaaactagagtgtagaaacataaaaaaatataagttttcatatccaagctgttgataagatattcaaatataaaaaaggttttgaatttgttttaaaaattaagtcttctaatttttcaaaaagaactaagataattgtccactaattgcccattaaatttcctccttagttctacttccacaaaagatattaccatctatgattaatttggatttcagaggaagaaaatatagtctgaggaaaatggattgtggagcaatctcaatgctaactactataaaatagcttattacttgaaaaatgaggatattgtatgaattttcactagtcaattggtagcaaaaacaaaatttaagtgattgtaaatatgtcatattttaaactatcttgtaaagatgttatgtacagagatattatatgttactagcatctggattcagaaaaatatgtaactggaaccaggtttaagttgggtaattgtagtgtgtctaataattttaatacaaggtaaaaacattttctgttgaaaatcagttttaatattaagttaggttttatttatattttgaaaatttaaggactcttgaatattcttaagtaaattgcaatttaatgcaattgtagttatactcagcagtatagtgacacttgattaaagccattataaaggaaacataatcccatactgatgatcttcacatttctttgggttaaagaccagtttatttcattgagattacagttcaggagaaaggttattgactacatgtatctatagtattgtctaagcaacaggagtttagtttgcatgtttagtatttttgagagcacatcaatgtaatgaaatgtatttaaaattatgcccatatatacataattatatatatttatttatatattttttacaacagtgtttttccttggagatgattcaatcaaattgcagcagagacacttctaattagttattaggaagtacaatctaggattgttttcctgaacgtttgtgactagcaatgttctcttacagacgtgggggtctggacacttggaccttaaattggaaatggttaaaacagtgttagccaaagaatgacaatggtttgtttgccaagtctttttgttttgttttgttttgttcttttgagacggaatcttgctctgtcacccagacttgagtgcagtggcgtgatctcggctaaccgtaacctctgcctcccgggttcaagcaattatgccacctcagctccctgagtagctgggattacaggcaaccgccatcatgcccagctaattttgtatttttagtagagatggtgtttcactatgttggtcaggctaatcttgaactcctgacctcaatgaatccatctgcctcagcctcccaaagtgctgggattacaggcgtgtgccactgcacccagctgccaagtctttttgtgttagtattgctgttgaatatatctggtgttttcattcaagaaaacacttaaaagccattttaggggctgggcgcggtggctcacgcctgtaatcccagcagtttgggaggccaaggcgggcggatcaccaggtcaggatatcaagaccatcctggctaacacggtgaaactccgtccctactaaaaatacaaaaaattagcctggcatagtggcgggcgcctgttgtcccagctactcgggaggctgagtcaggagaatggcatgaacccgggaggcagagcttgcagtccagcctgggcgacagagccagactccgtctcaaaaaaataaaaacaaaagccattttagggtaaaagaacctttctcagaactatcactgtacacatcttcctgtttcactgatccctcttctctcctttagttttaaccttttgtgatagctctttatgcatcttcttctgaggtcattgaagatgtgttctgtcttactggtttctgttaccactaagtacttcttatttctaaacaggtggtttgattttatgaccactcagacaactctaagtaagatgcaagcatgtgctacttctccctactctacactcataaacttcaaacaattccctcttctgtctgcatcttccgataaggatatagacttagaacttttaaaatcgatggctaaccactctttactgcaagagtggtatactatattggaccatgattatgggcaagatcacctaaacagaatggataactttacactctgtgtaagtactcactaggcactctcctagtagtgtctctacttgatagagcaaagtaatagaagaaaaatgagcaacttcattctcatgatttctaatatgtcatcataaatatgaggtccttcatttctgttaagtagaaaaccaatgatgatactgcttacagaaaaccatctgtccatcttcatctgtatcaacaaacttccaggcaatttgcattggcacaagctgttatttgtctttgctaatgtttaacaataaaattctcaatgacatacttgatactctggaaagatagtatttttattcttcacagggtagaacatgcattacaaattatgtaattagtaaaatacgtgcaatgaaatggtttcaatttcctgtatgaatagtttttatgatggttatctaataatctaaaatatttatatttcaattagtgttttacttaatactttattacttccttttaatcaatcaaaaaggaggtattacctgtccaaaggaagcttagctatgtattatgcattggagactacattaaggaattcactaggcaatgagttctaggtgttaaaaggggcattaatttaaaaaaatattaaagatgcgaaatttttaaagcctcaaagacgtgaataaaaggtttaaagaagaaaatactgtgttgatcgaacaatatttattttttcccaaatgactaagctttcaaatcagggactaatcatgaaagaccacatgacttatttttaaattaaaaacgatactgaaatatatttttctggttgaagagagctttattctaaaaagaaaaaatgtctatgaagcaaaaaaaaaaagaaaacatatgctcttttcttatgtttgctcaagcagaatttacctctgcaactcgtataatcagtgctataattatgtacagatatattttgatacttcaaagcatctataaaattccctaaatgaaaattattttagattaaatatattaatgaccaagacagctttttttgtttataagcaaattagattatattgcttatgaaagttttttatatttttattccatggatcatgcaaaaaatcatgttagacaatgaaaggatatcgtgttttctcctttttgccttattaccattttttttctgtgcttagttctgcctttgctgtatagtgtggaaatataaaaaattacaagaattgctcaggtgtctttttcaaacctccaggttgccaatatattcacttcatcactcttatctgattcccacacattcctctatgatcctacagagcagttacgtttcttataaaatctaacagaccacccaactatggtttgcaacatcaaaccgtcatgcttcttgtacacaatatattagaaaattgggtttttacatatcagagtagaaatatatttcacacatatttgaggcatactgttatattcctaaggaaataatattttatttaattgaagccacatgatttttactatgatgtaattactcactgaccaccaagtctacagacagcctttaccagaatcaagatacacataggtaaattattttgaatatcttttgaaatctggggtgctcaatttgatccatgcagattaccttaattagcatacatctattggtcattggcatactttttaaaatgagatataaaattatacaaatatctgtaagttctctacagcatcttttcctagcagcattttacagcggataaaggaggttgccagtagatagacaaaacaaaaaatagaaacacttcttaagcatacttttttttacatgtcataacatgaatctactatctttttttatttttacttttgtattctgaaaaaatgttaaaattggttattaccactgtctctctgttctttcctaataatgtccttttcctctattgtcagcattttaaaaaacattcttgatctctaacacctttctagaaaattctgacaaattaagtggcagctagaacaagaggagatttaaagaattattgttgacaatgaaaataatgaagtacatatttagcatgggcatgttgcatgttgacaatatatcattgcataaatgtttgaaatatttttcctttatgaagtaattgtcatcaagatcgaagctattgaatatatttgctgtataactttgtataaaatagatttatattgctttgagctgaacagatatttgcaatgaaattgtccttgtccatgttattttaattttgtctactgtcattggcagaaatgtatctaataccttatctctttccccaaatcacatacaactgaaagatgctagatgttaagagttctggtaaagtagtcttctaaaatcctttttcatttgtctagagaaaaaaaagtaccagaattcaggacagatttttcttcaaggtatcaagagtagaccatatagattttttcaagtaaatttctaaagctatattttagaaatcaaaaaagaaatatttgcattaaaaccattattcccttaaatttttagaggattctgtttgactttggcatgagtaaagtccattctcttatttgcagtgctattagatatgaggagttttagcagagatcctggaacaactgctgcctatcagggtgtgaaatcaatgacatggattcctgtagaaactatttactttgctatatctcctcaatatatgtatatacaaacaagatctttgacgctggcttgaaatccacagcaagaggtacaccaggaagcatcaaaaactattaagtatatacaaaaatagttgaatgcatacctcagttagcaatgttaacagagtttgtgtcccacaaccattagattttgctactcacaattatcagaccaaattaatatgaactcaacatctccactcaaggacagtatcattgcaaatatctgctcatttcaaagcaatataaatatgttttatacaaaatggcacatagtaaatgtatttgatagcttaaatcttgatgccaattacttcataaaggagcaaatattgtcaaatatttatgtaatgatgtattatcaacatgcagcttgtgttcctttaacatagtaaatgctttcttctgagagaaaaggggccttgattcttctatttactcattcttgctagaaaattttgcaaatataggaagaagaatgaatctagtaattttcttttctttttttttttttttttgacggagttttgctcttcttgcccagcctggagtgcaatggcacgatattggctcactgcaacctctgcctcctgggttcaagcgattttcctgcctcagcctcccgagtagctgggattataggtatgcgccaccactcccgactcattttgtatttctagtggagacggggtttctccatgttggtcaggctagtctcaagctccggaccccaggtgatccgccagcctcggcctcccaaagtgctgggattacaggcgggagccactgcgcccggccgaacctaataattttttagaacctctttcgtgcaagccagacattgtcctaagcattttagagacactatttcatgtatgtgtttgaaaaagttatccctatgaaagctaatgtttctgaactgtgaaagatagcttatttgctcctttaaattcatgtgccactttttcccattaccttttttaacatacattatgtcttctgggtcctctgacttctaaatggcctcagctcatggtgaacccttaacaggagctgcgaaggatgaagagttagaccagcatactaattcatcttgcttcttccctgtaagtagctacatctttaacgactgattcaaacaaagcatagactgtacaggatgttttacttctgattttgagtaatgcaccttctccttcagatgtgcttgtggtaaggaaatggctgctaggaagtgacaggttactttgctatcctttgtggtatctctacccaaaccctaatccatccacttgtaattaacccttcaggaattatactggtctccgtgttctatgtgtactgcttatgaactgacatctgtgtaaactattgagaattcgagaagcttaactcaaacattgaacatcttacggaaatagagggtgtgtctccacatttctatgaatattaagagtgttgatttttactctgttgatttttagcttctgtaaaggtaatttttatttttttatacttatttttatgtatcatatgactattaattgctcccaggtaatgtggactaaaagggctttcttagttgacacacactcatgcacacacacacacagatatgtatgcacacacgtgagacatttgcaattgtaaaacctactatggagtgaaaaggaaagggcataggcaaaatgccatggcttacctacaactacaatttggatattagatatttattttttgttctttcttcatagaactgctttgactgctcaggcttttaggggctccaaatgaattttagaatagttttttttctagttctgtgaaaaatggtattcatagtttcgtagggatagcattgaatctatagattgctttggacagtatggtcattttaacagtattgattcttccaattcatgagcatggaataattttgcatttgtgtcatctatgagttcttttaccagtgtttgatagttttcttcttagagatcttttgcctccttggttagatgtatttctaggtattttaatttttgtaaatattttaaatgagattatgttcttgttttcaatcttagcttgaacgttattggggtacacaaatgtgactgatttttgtacattggttttgcatcctgaagctttcctgaaataatttatcagttcaggagccttttgttgtctttaggtgtggaataatatcaggtgaagagagagagtttgacttctttttctgtttggatgcccttttttttttctcttgctgattcctctggctagcactttcagaactatgttgaataggagtggtgagagtggccatccatattttgttccagctcttaagggaatgcttccagtttttgcctgttcagtatgatgtcagccatgggtttgtcatagatggctgttattagggagcatgttcctttaatatctagtgtcttgagaatgtttatcatgaacagatgttggattttattgaaatatttttctgcatctcttgagatggtcatattttttttttgttttaaattctgtttatgtggtgaatcacatttattaaatcccacgtgttgaaccaaccttgtatcccagtaatgaagcctacttgatcttggtgaattaactgatgtgcttattgaatttggtttcctagtaatttgttgaagatttttgcatctctattaatcagagatactggcctgtagttttctttgttgttgtgtctttaccaggtattgatattagggtgatgctggctttgtaaaatgacttgtgggggagtcctgtcttcttaattttttgaaatagtttcagtagaatttgtaacaactcttctgcatacatctggtagaatttggctgtgaatccagttggtccagagttgttttgattagtaggtttttttttaatcactgattcaatttcagaactcaatattggtttgttcagtgtttcaatctctttcccattcaatcttggaagattgcatgttctcaggaatttatttcttctagattttctagtttgtgtgcatagaggtgcttataacagtctctgaggatattttgtatttctgtgtgattggttgtaatgtcacttctcatttctgtttgtgcataattagaccttccctctgttctgttaatctagctagtggtctaaaaatcctgtttatattttcaaaaaataaacttttggttttgttaattctttgtatgggttttggggtctccatttcattcagctccacaatgattttagttactacttctcttctgctagctttggagttagcttgttattctttttctagttcctctagatgtgatgttagatcattagtttgcaatcttcctaaatttttgaggtaggtgtttagctataaactttcctcttcacactgctttcaccatatcccagaaattttaatatggtttgtctctcttcacttatttcaaagaatatttttcacttctgcctatattttgttgtttgcctgaaagttattcaggagcaagttgtttaatttcctttcaattttgtgattttaagatatcttcttggcattgatttatattttttcctctgtgttccgagaatgtggttggtatgacttctattttttttaatttattgagatttgctttatggctgagcatgtggtccatcttgaaatacgttctatatacagatgagaaaaatgtgtattttgtcgttgatgaatggacaattctgtagatgtctattaggtccagctgaccaaatgtcaagcttaagtccagaatttctttgttagttttctgccttgatgatttgtttaatactgttggtgagttgttgaagttccccacaattactgtgtgggctgtctagggctccttgtagatctaaaagtatgtgttttatgaatatgggtgctccaatattgggtgcaaatataattaagatagcttagtcttcctgttgaattgaaccctttatcattacataatgcctttctttgctcttttttactgttactggtttgaagtctgttttttctgatgtagaaatagtgactcctgcacttttatattttccatgtgtgtggtagatctttctccaaccctttgcttagagcttatggatgccattacatgtgagatgggtctcttgaagacatcagatagatgggtcttggtttttatttgttttaatgttgatcatattttagaaaagtattgagaaaagttgtctttctgataaatgtcatactttagtaagtaacaacttgagattcacatcacagaatttgccttagaggttgagcaataatagcctttttttgactaggcttgtagcttctctaaaatttcagaatctgaccgggcgtgatgactcacgcctgtaatcccagcattttgggaggccgaggcaggtggatcacgaggtcagatcgagaccatcctggctaacacggtgaaaccccgtctctactaaaaacacacaaaaaaattagccagacatggtggtaggtgcctgcagtcccagctactcaggaggctggggcaggagaatggtgtgaacctgggaggcggagcttgcagtgagccgagactgcaccactgcactcaagcctgggcaacagagcgagactctgtctcagaaaaaaaaaaaaaaaaaaaaaaaattatctctcaaaaaagttttatatgcaacttttttaaataaatgttttactaatataaagatgcatagcatataacgcacaagtaatacattattagttcccttttcagggggagtttttgttaatttttgtcaaactcttaaatccatagataactgactgcagttagcaaataagtagagtttcaatatgaatattggttactacttttatatacattagtggtaagataaaagtaaaattaaaacctttacttgttcaccaatgatgcactcttctgagaatcataattttttaatacaaggataatatgtccgtgtatgttagggtggttcacaatgtaatggttacagacataatttaaaaaataatctgcattattaacatacttttattcattctttatttttacttttattaattacttttgttctacacaatcaacaaaatattaaattgaaccctgatatgtggtgttaattttcatgctgtaactactctcttcatgactgaattacaagctacaacctgagaccattaataggaagttggagagatgcacattggcttgccattatatagtgttgccatgatacaaacatcatctatgtaaatattttcggtagcataaatcacagcaaaatatagcgaaatacttaggaagtgatgaatttaagtaatttattttccttatttttaatataatttaattataaattaaaatgtttatttttaataatttctgtgtctaaaaatgacctcaaaatatttctaagaatttaatagttggatctcataagttgatatgagatagctctcaaacacaattgtgtataactaaaaagtctagaattatagctagttttagtcagaaaataaaatgatgtggtcagaattttaattctctcatctaagggaatagctaagatttaattttacatctagattgggtcacatgttcatatctggacgaattaattacaaccatccagttagaatacactagtcagaactgggtcatggacaacttctagaatttgcagatttatcaggttcacctaaacctcattgattcaaacttaaaaacattattccatcaaagaaaattggcgaaaagaactgctaaacaattattgcatactctttccaaaaatatacacctacagtataaaatactaataatgagaatatgtttattgaaaatttagtatatttcaaacactgctaaaaacttttacatattatctcattagatcaaataagacaactttatcattaatattatttatcttcattttaaatatgagtaagtctctagttatgtctttctatttaagatcatatatggaaagtattaggatggtgcaaaagcaattgtggttttgccactaaaagcaatggcagatgacttttagtttgtaatagtagattgtaatctgtgttaaaatctgtattccaatcttgactccaaaacttacattttacatatagaatgcaacacacttagtgaaccccacattctcatcattaaaagtccattcacttttgttcatggcccttttgatcatagcgtcatagaatatttcagctgcacaacaaagctacccattgcctagaacatgaaaataagtgagaggtgctgtcaatctaggataaaaacagtagaacatggttctaatgtatgaagaatgtcttctttaggagatcaataaatagtaagttgattagacaaaaacgtgattgactaagtttgaataatgaaaaaagaaagagaagactagagtggcaagtaataagctgaagctggggacacatgaaaaattaatagaaaaaaacttattgaaagaaaaagttgcaaatgcctttatttttgtttattttaggtctatatggcttgaataagcttttcttcccaaatccatatattccaggtagatacagtaaacttcattagatttgcttccaatagtttgtagtcattgtttaattggggatttttctgctactccaaatatcatatggaatcccagtcatctcttagtgtcttttttaaaaatgaatttgccaatattttataggtaatacaagtccagaatagtaaaattatccaataaaggcaagccaactaatcaattaatctgaaaataaaattgtcacctgaaattctactatgtaggggtcattgctgttaaacattagggccctccactattgtggggccaatttagttctatacactttctgatactctcaactgtgtcactataacacgtatcccttgtcccgatcaccaagtctttttcttattcttctactctctcaaattcttaaaatgagacccaacattgtctgaaggaaaaacttggggctgggaattaggatcttatcaatgaaaatgaagtaatctaaaggtcactggatatctttagatatttattaacatagatgaaatatggctagcaacatagaagcagaagatattgtgaacagaaaataagaagatgaaattatctaaaataggaagtataaaaaaaatcaaggacattggaagtgagcctgggggagcaaagttactctatcttttaagtaataattttctttatttcttttaataatacattatttagaaattataaggctaagtattaaaacttgtgataccagtgtgctcaaattatgtctacccattggagattctcacttttatcttttcaatttatattttagaaaaattacttgtccctgtttaactgtatattcatcccaatataaaatacataaataaaatgatatagtagactcaatactttaaaaaaaaaacttaaattctaacattctgtagttcttacacatctcatttgtaaaacaagtaactgatttttaaattaatgccctataaataggttaaatttatttttaaatttgccctccagagaaaagggttgtagcattctattttcaacatacaaaatcaatctagatattgaaataaccttgtcaatggcagatattctaacagatgatctaaccactaatttttgcgtatgatttatagcaattttttatttgaatctgtaggatgtaaatactttttacgctgaacatgtcaccaaacagtacaagactttaagctaaaagtagctaggaaatacatagggactcttaaggtgtttgaaacaaagattttacaaggcttatcgtctgctgaaagaaaaaaaaacatttcttcatttccgataatgtcagaatagataggccattgttgcacacataactgattctgactgtaagagtgagttatcccaagtgaaatcctctaaatgcttgcttgacgcaataggatgaaaatttgcaagcaagaaaagttgaaaagcaagccttggggctgaaaatttgcaagcaagaaaagttgaaaagcaagccttgggggaaggaacagagtatcaacatcacaataaaatctgcatttgccattttaagtaggatcctgtagcaggatgtagaggagcctgctgtgtttaaaaatgatcttttgcccttatgtgtgtatgtttcagcattgaaataatcagtcctctttcaaatataatttgatagcataattaaagtaccccactagcacaacttttgaagctaagcttttcatttttctagtgcacttagaaattttttcacttgtatttgataccccagaccaattgacttagaattccctgcctgatattgtaaagaatttacttctattatgtcttttaacacataaaatgttgtaaactgtcacctctaattatggtagcatgcaggcaatgaagcctaacaggacatctgactaaactagatgtgacatgttagtatcacaatacaccaaatttgaaagaatgcccttctttcactttatattagaaaatatttgattttgctttgtcatattttttgcttttcttttaggattcagtaatatataaaaataccaagttttaaagttgagcgaacccaagacctaaggccttgaagtaattaacaaatgagatgacatgtgtttgcctgtgcatatgcatttaagcatatttatgaatacagtcatgttggaggcttgatttacacagcatcttttagatattcagaggttactttggagcagcctatacttttgacctttagcaatgttcttgcaaaccagtcattcaattctactggaatgagattaaaacaatccaagtatggctgtgtattgatacgcttctccttgtgtccctctcccctcccagcaccccaaggctctggtaaagaaatttctgtttttgttctccagactccttatataggtctaatctattactctttattcaccaatgtctgtatattgtagtgactaatttcttgttaattcttctatggagactcttctgcaaaattcttgagaaaatgatttcattaagtcttacattctggttgcagtttatgtttggcccttagattttgggattcaagtctaccattcacagcctagagagacaaacatgatagacacaaacatgatagatagcagttgttttcttttggataatggagttaagatttcttccatataaacagttgggggaaaagcagacatatttattaggccctatttaagagtttattgattctgtttaacaaatcattaaaaacttcaaaaaaaaaaaaacaaacggtgtggaaggaactttcaatgctgaacattaaacattgaaacttgaacattaaagctcgaacattggctttcaaacacaccaacaaaacaattattatatgtatgtaactttcactgtatgaatttacatgccaacttgtagatttctctttgtagagaagaaaacatgaaagattaatatattgctttataggccgttaacaagtgctgtattttatccagcagtcttattttaacatttctccccacattatctttatatgccagttccacaaaatgtattttaaaccagttttaccttctttttggttccctcattaatgagttgtgtataatcttaaaatatgtttatcctaggtttgtgtgagaatcatctttttaatataaaacttctaaattttggttatgtcctagataacagatgaaaagaaattattatacttgaagcatttttttattccaattaatctcggtaataaatctattaaatttagctcaagaaatatttgtggaatgactacttatacaggtaatgtgatagcacctgaaaggggaaaggtttccttgtccaccttgcagggcatgtgacaggggaagtggcttgcttcttcagtgccctgctgctcaaacctctccgggaggatacagatgggcaggctgtggggctccgaccccagggcagcgtccaggagtgaatgtttacagctcctgaagccccagtgggcaagtgttatagggtgctcttttagttttgccgtctataggattgtgttaaccacctcaattacaccctctaccttgttgcaaggacagagggctttctgtaccccaggttcttaccttgatgtactggaagaattggctcacacctgggcttggagaattagtacaaggttttatttagtggcagtctctctcagcagatgggggagccagaagggagatggtttttccctgatgtggggccgtggagcttctccaactgctctggccaaattctgcatcattctgctggcggatggcctgctggcctgccggtatcttccacctgcgtgctcctcttgacatcctctttacgtctagctgcttgtgtgtctgcctgctaggatctcagggatttttatagacacaggatggggcatagcggccgagggtggtcttaggaaatgcaacatttgggcagaaggcaggtgaagccctagccagggaccatgccctcctttatccagctcttcccttccccacttctgtatcatttaaagggaccatgaccttcccttcccagcactcccacgtcacagccactcataaaaagtgtctaccatctggtcgcttcactccaaaagatccatgtaagaaaatttaaaagaagatatacaagataataaatgataaacatttatagatagtcataataaagtggatcataagaaaggtgaaaggctgtagaaactgattaaataaaaataactacaaattcagagaatataccatttcttctaaaaagtacgtattcaacttatgttaaaaatgacactgtaaccactcttctactctcagtgaaatcaacttttctgtcaaatttaaaggatgatactgtacagcatttctcactaaccatattttttcaacttttttctttctattctaacaaccctttaattttctcaacgttcttggccgatgcctcttacttaatgcaccaagcattcaacagtcagctacttggaatgtgactgatatggtggatatggatgtttccgctgccattaaggacatcaattataactgaacagtaaccacagacaaaaagccttatgagataataactagttctccataatttaacactctcagtaaaaacaagccatgatttcataatgtaacattctttattttggtataaatatgaaaaaatcagattcataatacatttgtcttgaatttttttaactcataaagaagaactttatcaggaatgttcaccacttctactgcctcagctttctattaggtatgattttagatgcaaaagtgttttttaaacgaggttttatattgatctcccattatactcaagcactcactaacataaaaaactcacaagtacatagtaagtttgaagataacagatttataattttgattttcaatagaaagtattttatcctaatttacttagaagataatagcatatttagaaatgaaaaatagttttcactttttaatgcaaccagttaaaaatagttaactgactctcataagggaaaggtattttgtagtacttaagacaaaaagatatacttgtaaatattacagatatattttaaagttgacaaagtattctcagccattttaagtcataatctgtcaaagacaaaattatgccactacagaggatccaagatgataggtctgatctgtcagtcatgaaggtttataacaaatagtatagattgaagcagatcaagcatgaagtccaagaaaattgtctaatgctgtgttgtgttggcaaattccaaaggtgtggagattataaaattagaaagtggcaagtgaacagtttgagagacagtgggctcatcaatggagacatgacataaacaacagaattgctttacaaaaggaaaatggacatttttcagagactatcatcccacctataattgctttaactagtgcacaaatgacttcctaagatgacaggtatcaatctttcatcaacctttctctgcagtgatgcatagaatagatggtgttaaggtatccaatggaagtgtcagggtcaataacataggacataataatataaaatcactgcaatacttattccactgttagaaaaaaagataacaaaaataacataccagattactggcattgaggttgagcatgactttgcaggaatgaccagggcctaaaatatgcctctcatttatttcagtgggtatttgtgaagccaaaactcagttcatatattagacaaggtgttggagaaaaaagaatgagaaaaagagaggtgtggtccctccttgctgtcacaaagtttactcaagtaacgtgtactcaagcaagcaagcaacatagcatattgcaatagtgtttcaataggaaaatacaagttaactgcagcagcacatttaggagaaaacaattttccaggaaggattttcggagacatagttattacaggagtagttactcatcatacttaatacatacgtatatttataataggttgtacttttgtatactacaattcaaatacgccaacttattttctttagtctatacgagtttattttctttatgcaagtttatcttgccccattacttctattatttaaaaaaagaaaaatacatacatatatatgcatatacacatctatatgtatatgataactcagtctctactgatttaaaaatagttaatactaatcaattcaaatgttctctcaaagtcaaccaaaattaacagcccctgctcagaaatcatacataaatctaaagtcttcacgcttatgctgtactacacttcatgaatttttgtttacggaaatcaatattttatgccaaaaatagaatgctccttagaaaataattgaaagaaggaaattcattgtataacagaagagtagcagttgattgagataaagagattgttacatgcatgagttaaaatgcttaattgtgtttggatcctatatcagaactaatttcctctctttttaggttagcattgaggtgaatcccttgatgataaagccatatcatcacctgttttattctaaacaaagacatttataaaaatggtaaacctgattaaatttcatagtattaagaaagattcttgtgtaagattgttattaatttttacaatgctcctaatgtcagctgaggtaaaattaattagaacaactgtatcttaggaaaatagagtcaatgagcagagattatcacatatttaaaggaaataagagcagatgaaagctgttcctgaggaacgaagtaaagagagtttgagacagtggaagatggaacaggaagaaaaaaataagataaaatggtgacatctcttaaaattgttttggaagagtcatttacacactatggatgaatagcaatttattcctggaaatgcttgttgcacaggttgtgcaaattctcagttatggatagatttagttattgatcagtcatactgctttcgagaattttaatcgtttagatctcttaaaaagttcccatgtatataaacaaagtccatttacttgatggcattatattagcctcaggatatttggaggacttgcatacttggagacaagggcattccagacatcagatgttttcaggacaaccctctcactcagtgaaacagattgtatgttttttccactgtggcttgctcctatttatttctatttccttcagcccagaaaggattattgtaatgtatcaagttcatcagcatttttaaaattcttacattaatctatttaaattgaggttctattttacctcaaagatatctattacctgtatttatccaattgagttcttgccacatatatatatttttttaattctgcaattcctctgaactttttaagagatcttcacttgctggttagaataatcctcaagtttttctaatcatagcacttttattttctcattcttccgattgaaattctatcctcttcatttacaaaggtgaatatatttggaactgtcatctccaatgaaaagcaattagaaaccctagaaaagatatttgaaataattattacaaaccattttacaatttgttaatttttccagatttctataaaaagcaaatgcaaataggaaagaaacaggaactgggccttcatatgttttccaatctgagctgacttcaagacttgaagattagctagcggtaaacaagataaaataaatttaaagaggatgataaatgtagaagttatcaaagattacaattttttaaaatctcaaaacttttgtttaaagagattcccatcaaaggaatttgtatcaaaaagaaaatgaataaagctgaaatgtaattagaatcaataagaaaatatcagagctggaaggacattaataaatccttagtaaaaatagcattatacagatgaaaaaaaaagtctggggtcaagaaacttaattgatttgtctaaggtcatgttacttttcaattcatttccaagaccagtgtttctccaaatagagattaatgaaaagaagaaagaaaaagcagatctccacttttcacaataccgaaattgtgccagtactgttaagagaaaaatatgtttttaagaactcaacaaacattaatcaaatgccactgtattctggataatatggtatagattcagtcatttctgttgtatccacatcatgtccttcaagaatccaacgaagttatactctcaaagaagcattagatgatatcaaatgaaaatacactctttaatcaacaggatcaactaaaggggcgtgggggaaaggggttgatctgttcagtgtatgcaacagtgaagcagttggaatttcatagaaagaataactcccagggcagaaggagatttgaacttcgtatctacaaaggagaaagtcttatgatggcaggcttgcaggctttgttacattgagaatataaaaaggaacgaatttaaaagttttagtcaaactgaattagaaaaatagagatactctggcctgtacttaatgtaacacctcttggcatccctcaaaattttggtaagatatctaaacctctcaaatcttagtgactgaaattatcataaaaattagagcacaagagagtcacgatgtcttagtgtgatcagcaggacacatatcgggaagctcattgttaagtagagtccttcagagaagataggcaaaaaagaagtatacagcagataaaatcttttcagtagagcaaacctcggggaaaattgaagtaagtgaaaattgatccgtgccttaagtttttaaaaaattagtattgaacaaattaatagatacttttctgacttttctgatttcaatatttgataacctattcttcttgaaaattgctctcttcttgatttccataatactgatcaccactagtttttctcctttgttattactttttattggcagaagaagccgttgagattctggatttgatagtagatgagacagaaaaaaaaaaaggcagagtacctgaattgtttggtttcttagttgctggtagaaaaaagtgtaatgacctcccaccctacacaaaatcttttggacagcctggaccaacttcttccatttcctttcctctgtccgcaccataaatactagtgttcttcagtgtttggctatattctcttttcttctatattttacacttcactgggcaattgtatcaactttaatttaattgaccccactattatattaatagtaactcctaaatcttccttactagcacatatggcatctttttattcgtacacacccaagcaataatagatcttgacaatcagatgttgtacaggacgctgatatttaacatgcctaaaattcagttcattaatttcttctaagaaagttgtaataaaaatgctaagaaaagttaaaactactgatattggattaggagaattttatgaggaagtatttttgtggtttctccatgtattacaactacatatgctaattgattttttgtgtgccaggtaattatcttagtaggaatataaggtgcagaaatgacacagagtccttacagagctggcattcttatcagcacaaaaataactatctagaaacaaataaatatacaacaaacttctaacagtaaaagataatgtgtgttagggaagtagagttgggacagggatatttcagatggaattatccgaaaggacctctctgagatcttttgaaaagagaaatgggtgaggtaaagaagaaaatatgtcaagcttcacaggaagagtaaggcacattttcctaagtaaatgcattttccaatttagtagtaaattgtatgttgtctagataattctttttaataaatacggagaaatactgggcatgagtgttttactctgagaacatatgcactgcatttaaggttaaggaaacactggctcaaaaatagatatatactcacatggaaaaaaagtaaaatagatttaagacaatgaattgtttaacttttatctcaattagataaacatatttgtacatcttaaccaagttaaatattcacctttaaataaaagagtttttttttaaaaaagtaatgaatatagtgcaaaaaaattgtggatttgaaagtgaattaggtttcaattttgacataacaggaacttcctttgtcattttttagtgttgtgtttatatttatagcttacacactttctgcaaatacattagactcaaatattgacattaattgtcatgtttaacacagtcaacttaaaatatgagatacaggataaatattttatgtgagtcaataactatgttcatttcccaatgcttgagaaaaaaattcaggcaccagttattacctattatagtggttgatgtgaaaacctaaagaaaattcttttgtagtacaaacttttaaaaagtttaccaagattatctctaaaatgatacaatgatagatttcttcatggaagaataacgatatttaaaataacaaggaagcttgaaaattttaagtacagatagattatcagttataaatggtgtgaaatgataaatgttatttgtataaaaccagaaacaataaagcatttttatcttctgtaataaaatctcaaaatttatggaagtcaactcttattttaaaacaatatgtgtttacagccctaatattttgcatatgcatatttaggttggcagcctatggaaatgcttacttatgcatagtatatgaatttctagtaatcatttattataaagaaatatgaataagtgtgcgttaagtgcaaaactgatgtttacctccaaataatttatattagtaatttgctccagaatggttcacctatttttgctaagagaacgttttgatctagttttctaattacaaataagtcaatattacaccctcaccttatgtttaatgttttgtgtttaaaactttttccttatccttgaagatagataatccggttatgaatataatctttacaatatatctggaatgctcactttatttacatttggaagcaatgtcttttaaaatgacacaatcatatataaaataatctgaaaattaattggaatcgataatgcacttataaattttaattacatactactatcttattaaaaattaaacatgattatgtaaaaagtgaataaactcttgagaaaatcaagaccatgtgaatattatttcaggcaggttggataaagaaatttcttatgattgtgtgtctttcattagtacatgacccaaaaattaaaagtatatattttcatacattgttttcagtttttaatcaggaataaaacatgatgaatgacagatagctatttctgatatatttaaaaatcagtaaattctatattgcagtaatgtgctaatattccttttagtcaatctgatacattcaagacaatggaaattttgaattataacatcaaaatgtcatttttatcattttaatatttttactgaggtgtcacaataaaaaaatattgggagatgaaaagttttaataaatataattaaaatgattcatgcaataatatttaacactttgtgccaccacatagaatgtatgattgcataagtttaaatattccaaagctttatgcaattatgtaaattagatgtgacattttatcattaataaaaacatatagtgaattttaagtttcagtgccttcaagctattaagtggcagaatctgtaaacaaggtataactttctcattaaatttactctatatcaaattgaatctgagatcagattatataaaaaacacaaaataataccataactttcaagtcaaaacagtatttcaactttataaagatggaagatgtacaagaagagaaaactccttaaaattataaatcaaacatctaatgtttagattttattcaacactaaggagacctttttattttttaatatgcatgatttcactttatttacagaaatttttgatacataaatgaaataatttgttactttataagagaaaaatttgttatctccttttttcaaatatatgcttcgattaatactgtttgatatataaagcttgatatccatagaatgtttcaagaagattgccttttgatataaatgaagtacatataaaatgtatattaaactaccggcttccaaaaacaaatataatggttgtactataaaaacataattttgaatcctgaaattgtggaaacaatttataattcatttttagtataactagttcctaaactgtaaatttaaataataattgataaattataaataatcgtaaattataaataaattgataaattttaaagcaagtatcccatttatttgacaacatttatattgggtaattaacaaaattttgtcattgtaacacgaagccattttctcaaaattataaatgagatctcagtacacccagttcacatttcattacctccttctttagagtatttcccaatatatagctctttacaattttataatattttgacatgtctttttatggtgtagttggatgagtccactatttgtttatgtacagagttcagcatgcagtttctgccacttaataactggttaatcttaaactagtttttatgctttcatctcaataactattatgggaaaaataatttctaggggagatttgttgaaatgttaacaatgcattattatgttggccctcctatgtttgtgtatatgggcattgcatacataggagaaggatatcatgaaaattccaaacaaacatataaaaagacatggtaaatatctaccttacaaaacaagaacttgtcatatttttgaatgtctatatgcaaaaagatacgacatatttaaagtctaaacaaatattagagacatagggctcaaggaaaccaaaacacttagctgaatagataaaggccataaatcatcataataataaacaaacacaaatgcagagaagtaagatagtactgtgactggtattaacactgagaacatctgttgaatacttttggcctagaactgaatcttagtggatatatatatatatttttttcttttcttttcttttttttgcacagattgagagataaactaccaaacctggaacccataaagggtgaaaagttagtttagagatgagacccccacagggaatgatctcctgagtgcacaaaagtgcccacttgttaacaaaaacaaaagataatgtatttgcccatgttgacaataatattgagtagaaattgaaaataaaagctaaaagtctccactaagtttccagagacacaatctaattgttaccggtggagtgtgtctggatccttggtattttgaacaaagaactggacaaaatgcacaaacaaagctaggaaaaatgaagcaacaaaagcagagatttactgaaaatgaaagtacactctacagggtaggagctggcctgagagaaggtgctcaagagcctgattacagagttttctgaggaaaccctctagaggtttcccattggttacttggtgtacaccctatgtaaatgaagtcatagcccacatcagaatgattgtttctcagaattgttgaaaaatgccaattctcagatttggggcagtggccaaataaattaaaaagcaacctataaatatcattctaaaataagtcaaaatttaaaaaataaacaatatgaaaatcgatgtaaaagaaagcaaaacataaaattatagaaatagatgaaaatattaactatttttaaaatattaatggtaaaatgccttaaaaaattccctctaagaaaaaaaaaattgccagttgagtttcaagcctaaagacagtttcatggctgaagactatgagacaggctaaggtaagagaattgcctgagcccagaaggttatgcccaacgttggcaatctagcaagaccctgtctctaaaacaaacaaaaaaattatcagactaaataaaaaaaaatccaaatttacgctatttaaaaaaactttctaatgcttaaagatgatcaaaagtaaaataactgagaaatatctcaggtgagtactaatcacaagaatcttactctacgtaggctattaccagtagaataaacttcaaggtaaaacaatgagaacaaacaaaaacaaaacctgtaactcaagatcaagaccaatacagactcaaaaagttttagtacatattagattatatttgttttaaatttacagtaataaaagagcttaaaaatatacaaagcaaaaatgatggaacaaggatagctataagtcaatgatagactaaatgcatatatagttcaatatatgtataaaaatttaaacaacaaaattaatacgtttaagctgaatagaatacatagaatgcagcctgtattagtctgttttcacaatactacaaagaactatctgagattgggtaatttatgaagaaaagaggtttaattgactcacagttttgcatggctggggaggcctcaggaaacctacaatcatggtgcaaggcaaaggggaagcaaggcacatcttcccacagaggcaggagaaagagaaagagcgaagggggacgtgccacacttctaaaccatcagatctcctgagaactcactcactatcaggagaacagcaaagggcaaatctccccccatggtccaatcaccttccacgtggtccctccctcaacacatggggatacaattcgagatgagatttgggtggggacacagagccaaaccgtatcacagcccttccaaactaaagtatatatattgtttcaaaaacccatgatatatttggataagtaatcatgtgctggtcatatcttattaaaaaattagtatcataggccttattattcagccatattcttatcactatagacattagtaacaacagtaaaataacataaaagacgctttggacataaaaatttaatgagcacatacgaaaatactaatataaataaaattccttagaactcagtatgtaaatattacttcttgaaacttgtaaaaggcagataaagcagtacatataaatttgtattacacaatatatggtaattaattataacagatgggatgaaaaaaatcatcattactaagatgtcaaattccccagattaatctgtcaaattttactgtatttggtggaatatcattatgtcatatctcattaaatgtcaatgactttcaacaagataagaagttcttgttgatagattgatcatctcccaataggcagccttagtactccagtttttcttagtgactcactggctacttattttgggctggggattactatgatggagctgtatggccctggaaagaaacagatgattatttgaaaaacatggtagcattttatcctgttgagcatttttccaattgtaatctttttatataatattaaaacatagccttttcaaaagttaattaatatactaaaagccattaaaatatcctaatttggaaaatcagactagttttaattacccatacaattctaaggtttatgacctctgaagtaatgttccacaactgttttgtaatcaatctgtaattatttttgtgatgtcataggtacagtagctgatccccctccaaaaaataaacagctttcaaaacatttgttattatttatcattgtctatgcatgtattcattttgtgctgctataacggaatacctgagactatgtaaattataaagcacataaatttatttctcaccagtctacagaccaggaaatccaaggtgaaagggctggtaaaacttttaagggccttcttgatgcataatgccatggcagaaagcaaaagggtgaagaaagctgggtgtggtggctcacacctgtaatcccagcactttgtgaggctgaggtgggtggatcacaaggtcaggagatcgagatcatcctggccaaaatggtgaatccccgtctctactaaaaatagaaaaattaactgggtgtggtggcgcgtgcctgtaatcccagaaacttgggaggctgaggcaggagaatcacttgaaccggggagtcagaggttgcagtgagccgatatagtgccactgcactccagcctggcgacagagtgagactccgtctcaaaaaaaaaaaaaaacggtgaagaaaataaatccaaattattctatgtgtcatattaagtcagatctatcctactgtccatatgataaaagagctgtaagtaaaattaaatctaaataaaacatggtttaaatgaatttgacattttatttttcttaagtgaaagtatgccagtatatttagaacagttccatgagtataaaacccttacactctccataaaattatattcaaccaccatttgactgcagtttgttgcttcatagtctgagaaaggctcttccacttaaatattgcacctattttctagacctgggaaaaatagtacatgccagtcaattaggtatatttaaaagagtattctaaaaatgcttatccagcgctttttgtttatatttcattggtataactatgtctcctagcattcttggctacaatgggccctgagagacacattttttaaagctggaagatggttttctttacaataattatggttattttacagaagacaaaaatgcaacttaggctattatctgtgaatgtcacatgaatcaagtgcatttatttgccattgtttatttattggtataggtcctaaccttgtgacttactcctctataccaaagtgagcagtgaagatgttctatacaaaatctctccatgggaaacatttatattcttatcctactttagtaacatccctttttggaataaacacactctgcagaataaaacagaagccctgctagaacttttttctctttcccttaaaacaattatagtcaattttaagagactatgatagggttctctaagtggacttgatgatgaagggctactagtaatgcctgtctttatactttgtggatcagataatgtcatactgactgagagaaataaatattctggttacatgggttccatgatacttacattagtaccaaaggctgtttctcgaaaatatctaaaaaagaatagagattccttcaaaaatttgatatacaggccaggcgcggtggctcactcctgtaatcccagcactttgggaggctgaggtgggcagatcatgaagtcaggagatggagaccatcctgtccaatgtggtgaaaccttgtctccactaaaaatacaaaaaaattatctgggagtggtggcgcgccctgtactccaagctacttgggaggctgaggcaggagaattgcttgaacccgagaggaggaggttgcagtgagctgagatggcgcaactacactccagcctgggttgtaagagcaagactctgcatcaaaaaaaaaaaaaaaaaatcctatatacaatgtctatactcattaataaaattcaaactatttctaaaccactgaatcacttgccccagctacaaagtcccatatgaaagaatcaaatggccaaatttaaagcagaggaacttgccctggattttaagaatgtggatttttttttttttttttttttttttttttgagatggagtctcactctgtcacccaggctggaatgcagtggcacagtcttggctcactgaaacctctgcctcccaggttgacacaattctctgcctcagcctctcaagtagctgggattagaggtgcctgccaccacgcctggctaatttttgtatttttagaagagatggggtttcaccattttgtccatgctagtcttgaactcctgacctcataatccacccgcctctgcctcccaaagtgctgggattacaggcatgagccaccgagcccagtggaatttttctaaaaatgactttcttaactaacaatatataagtcccttaacctcataggtaagtcttattttcgagatataaatgaaatttcaatgttgaaaaacaaaggagcatgacatatgccaagtatacaagaatagctatcgaattcattcaagatgaaatttagagcagaatattatataattattttaaataaaagtaaaggatatgacttagggtggtggcccatggtacttgttgagttgagaggtattattaacactcttcaactgtgatcgatttttcagtaggttaatgaccagtttgaagtatttgaagaattaatttctctttgtagtctacaaggaaaaaattcaagtgaaaatattctcacttgaattttttcaaatatgtcaagttaaaactaatttcgtacatccggaaatggaatctgctaagatggtttacaaatattggtggtaaaaatgtatgtgcatcaaaaagtacataattggaaaaatttatagtatgtgaaaatgcaaggtatataaaatcttttgtcattccctattaccagcatatagttgaaaaaaagtctgaatctcctaatcacgtgaacttcattcattcttgtctgtgtaaccattgtcaattctataaatatttttatggaaaattgaagaatcctaacctacctgcataataattagatcatttagcagtggtaacattttatactaattatttggacagatcgacatgattgaaatttttctaaagaagaatcaccccaatcacttcattgaaaggctttgaaattagcttttagtgtaaacatttgtaggtatttatcaaaattaattcaaaaattacaaagcaaaatagtgcttatatgaaaattgttgactactataatgtaatttcaacaactaaacaataaatcatttagcaaaatgccaatctgctatacattctctctgtgctttcataagctataacaaaaaggtagttcttcattcccatgcaaatttgcagtaaaatgtattttctctgagttcaaactacaatttcaggactggtacttgaaaattgatgtagctataaaagaaagtttaatatttcaaagtgaatgtaattatacaattgagaaactcctacctcacctttaactggaagtgacaactcttgcaatataataatataatgatatgctaaaaggcaaatatcaagggaagaatctggtagaatgccttccaaatgttttgtgtgttcaattaaaataatatgcttatgaactgatatcaatatttggcggtatctctctgttaaaaacagtatcaggctgggcacagtggctcattcctgtaatcctagcactttgggaggccaaggtaggtggatcacctgaggtcaggagttcgacaccagcctggccagcatggtgtagccccgtctctactaaaaacactaaaattacctgggcttagtggtgcatgcctgtaatctcagctgctctggaagctgaggcaggagaattactggaacccgggaggcagaggctgtagtgagctgaaattgcgccacggtactccagcctgggcaacagagtcagactccatgtaaaaaaaaaaaaaaaaaattcaaagataaaatatgtaaaatttcattatagatgagtattaacagataagcatttgcaatcaattttgatgataggtaaaataaaccctgaatctcaattaagcaaaatgctgtttcccagtaaagaattcaattgtttttatcagtagattcataagtctaattattatttttttattttggtcaacaaaaatatggaaatgtgtcttcttgtttgatatataagcagacatatgatatcctcaattttgccttttggccaatgaagcctaaaacttttactatctgatattttaccaaaatagtttgcaccctgctttgtcattgactgtttgtcataaattatcaactcaagtgttcttgagtagaaaagttttacctatcttctacttaggtacaagccagtgaggctctgtagagtgcttaacacctttgctgataacttatacactatcatttccacattgctctttgatctttcctttaaacattcttgtcattcgtccttgctttagagcctctgccctagataatctttgtctaaatctcttgtcttctaacgtctgtctctttctcaccatttaaatctcataaataacattagctcttcagaaagaccttctctaagcactatatacaatgctgcccatcccaccagaccccataagtaatatctctaaattttcttcaaaatatgtaacactatattaataaatgtattcatttatttgtatatttattaaaagttggtctcccagttttctctatgatagtattttataagaaaacaatgattttttttccaattaatgaatgacttaattagattatactttgtgactgtaggaactatgacataatcttagcacagtggttaatacatatttaataatgcaaaatggatcattagttagattctacttgttgctaaaagtttctagtcagaaataaaggaactaacacttctgtactcataaattaataaaaagtcactttgaattgactcattacttttcatttatcatgcactcctctaattttccttccaatttgttttttattctgacttaatgcatttttttaatcaatcctgctcaacaaatcatatatgtgataggaagataacaggttctcacaggtcctgagaataaccttgtacaaaaatagatttttgatttaaattgcctattaccatagagtcaaaatatgcttttgtaaatctataatctgacaaataactagtaagttatttgaacttaactagtcattccactacaagtaacactataactggtattttgcttttaatttagctacctcagacttgtccttatttttaataactatttatctaacctgccaagaccatgacaaatgaccccagggtatactgtgattgaatgtgaaatttctgcagtgagaagaatcccgctaggcaatgttaagaaagacaccagaaacctctgacccttcagtttaagtctagttggtttcccattaatccagaagtcctaaaataaagaagaaatgtgccacctttatacatgcagacgcatacacaggatatgccaataaatggagcatctagtattgcgcatcagatgcaaaattactagggggaaaaaaaagcaaagcacatgctgctttttaaaataaaatgttttacaatatgtagaattatgttttcttcttttttttttttttttgagatggagtcttgctctgttgcccaggctggagtgcagtggcgggatctcgggtcactgcaagctccgcttcccaggttcatgccattctcctgcttcagcctctggagtagctgggactacaagcacccgccaccgcgcccagctaattttttgtatttttagtagagatggggtttcaccgtggtgtcgatctcctgacctggtgatccacccacctcggcctcccaaagtgctgggattacaggagtgagcaccgcgcccggcctgtagaattatattttcaaagatgcatgggtatatgtcaactcaattaaagaatagaaaaattattttcataaattatacaccttttaaaatgtggtttcctcattgatttttaaagtaaaatatatttgtacaaatgcatttttgtatgttttttctttttgattccccaaatatatatacattttagcttttttataatatatattataaaatatatatgtcatatatattttattttatatacagctataaataatgaatttatgtacattcagctttattgaggtagaattgaaaaataaaacttgtacatatttaaggctgaaaatgtgaggacttatgtaggtatacattgtgaagtggttatcacaagctaagtagcatagatagatatagatatagatagatatatatcttagaatatttttaaaataaaatattggtattttcaaatgttgatttagagtattaactggagttaggcatttctgttttattgtttgtaaattattggccccctccgcaaaattaaatcagctgagacaaaacatgtaaaattaaaatgaatttgtgttagatagaatttttgcataattgtatttgaaacaaaacttacacaatgtctaattgcattataagtgaaataagtatgttagtgatacaatattggcatgatgaaatgcacacaatctgtgctaatagtcttatattttgttacataaaataaaattattaagtagtatcaacatttgattctgatattatgtattagataagacagacactcaggaaaatgacatgtttcaagttatatttaaaattaaattttatatatggttctcttagaagttttaggagatgcaggacagtttatgaatttttgattataaaattaatttcagacagcttgggatcaaaacttatcaagtactaatttatgattttaggcaaattacttaacattttgtgccacagtttccttattttgaaaataacaataatatttatattgtctttagtaatattgtgaagaataaatgagttaattaatgtataatacataataagtactataaaattgtcaggattttttttttttaggtattatcagtttaattcagtcattgacaatctttcctaattcaaggtgctaagattcatacacattaaaaaccaatgtaattatcaaatgatgtcttctaacttgattaaaaatttttggctttattctcttgtgagaaataaatgctgtaaacaaatgacaaacttagatggtggttggaattactatcagctctgacaatgaggcacagagccaactacactgaggaaagctgtctggatataaaataggttcaaactaataaaatgtagaaccgctagagacaatttcttgaaataaattatgaagatactcttaatgacatccccccgttaaagattataattagtgagaatgaaaaatactaaggtccttgtatacatgtatcaaaatattgttatgtaccccaaaaatatgtgtaattattgcatgtcaactaaaactataattaaaaagcagaaatacaaaaaaaattccgtagaaaactcaataatgttatactgtcttcagggttttatctaaaaaaaatcctttttactatctatatgtgtatcaaaatcatcattatttacatcttatatatatatatacaataatatttttaaacaaaggttcatgctaataaaattagaactaccacagaaaatttcttaagataaattataaagattattttgactatgtcctttccaacaaggactatgcttagtgaaaaaaaaaaatactgaggacaattacatttttcttctctatatcctggcatatcctcgctgttactgaaggctgaagttaataggttggggtcatcaccattgcaattcagttattagtttcatatcccatagagttactaaaaagtgtgtcatgtgggaaaaaaatcaacaaagactatctacaaatgttgagaatctaaaagttgtcatcttgagaagtcagtgctgtgaaaaaacaaaagaaaatatttatagcatgtggttctcagtcaattacaaaccacaagatgttaaaggcatgctggtttgctaggctggcagtgttgatctgcctttagggatgagctgatgcagatgtacatagtagtcatgaccaagaggacgttcgtatttattcccctcagcttcacaaaactttaaacaggcttgttcctgctttaggccactgaccttcctttttgtataccatttgatttagaacacttgaaactgtaaattctttgtctgtccctttgagatgtaaatacttttgcagcctcttaccagtttaacaacccaggggtattttctcaaggacctgagccccatcccctttaaatgtaatcatcaagttgagtacccctatctaccagtttctatgggagggtaaaacctacattagtactggtgccttgagccaagttgtgaaactacttcctgtcataaaaatattaaaatgtccatttttcctttcagtaaagccaattagcaaacacatgtggcctatgatcctcttaccttacatcttaaaaatgcttcagttctttatgtagagtagagcccagattgaatgctggcctctccccacaattgcaatacccttggataaagtattccctgctgtttaactttgtctagtgaaatatttcctttgacactgctcatttgggataaaagttcaaattcaaaaaaagatctaattcaaaatttggccttttagtaactagaaatgtgcctctgtttatagatgttctattgagcctcaaatttaggctcatcaataccctccaaaaatggtattctattcctttgtctccttttgcaacctatcttgacataaaatttagaacagtctagagtaactagacatttagagctagtgttaccagaatctatgtttcataaaaaaggcaataaattctgaaagtaacttctctgcccagcaatagcaccaaggggtcacaattctagaaaacatttacagacatgcatttatgatgataaccctttagttttagccttgtgttttcaaatctctatgcaaatggcataagacttttttgtaatcagaaattagtcccatatacagccaatatgatacagtgaaaccatgaaattcaggcatacaataaatgtaactttttattctcccttgtaaacgtgggttctgtctctagatcatatatgtatgtgcttttctttttttcaccaatttcaaatttaaccttgttagttaaggtgtctctcctttctacaaaattattttgtgttaattctacgtgggggcagaatgtggtgtagtgtttgccttttacggtgctctggcaacacttgacaacattcttccctttctgatgtttttcatatcttcacattgatcgagatggacctagtggttaggaacagtgaaatcagtcagtcatttatttgttcaacaaatatttgtttatttattcaacaaatgcttattaaataccatgtcttgcttgggatggcaaaatacacaatatttccctaacctcatagtacatacattttcacattgaaagagaaacaattgaaattttaaaagtaggtgtcatgttttttgtgaggaacaaaaaacaggaacagataattaggagtgttaagggcttcaattttaaatagggtggtaaggaaataccttcataaaaatgctgctgactaaaaaatggaatgtgttgagggaataagccattttcatattgtgaggaagagcattttaattcagcaacacaataggtagaacacaacagaataatcacaagttgactattagcttcaaagaattaggtctgtgaatgaatgagaaacaagaaatgtgattagataaataatgaggatgtggtgagaatgcatctcttaggcctggtaagccattgtgatgattttgtatttcactgtggatgagttgggaagtcatcaggaagtgttggacatagtagtaacacgatgtaacataatttgaaatacactttagcccttgaattgagagtacgttcttggagtcaagtgtgatacaaaaaaaatcaattaggagaaactcactataattcaggaaaggaacaatacagagtttatcatgatgaaaacagtgcagagatagagagaattggtcaaatttcagatacgttgttagaaagaacccactttttttgaggaattaggaattaaattgtaatgtgagaagatgttaaacactatggatgactcaaagagtttggcctaagtaacagaatggatgtgtcactaactgaaatgagaaagagtataagaagcacacattttaggggtgaatagaagaatcatattggcatttcgtatgcctagtaggcatctgagaagtgacattgaataggcacctgtgcctgagagtctgtaactcaaaggagattgcaaagctgaatttataaattttggagttctaagtgtacagattttactcaaaagtataaaaaaaaaagaaacatgtagtaacatcaccaaagtgactataaatagaagagtttgaaacttgggacactttttaagatgttacagagaggagtagaattagaaataaagtagaaggaaaatctgaaggtagaaacatgaagataattggagaccaggacaagagcagtttctctggggtagtagcagcaaaaaaatggtgggagtggattcaatgaagtcatatatgaaaaattagatgcagataaactttatgttttgcataaatattgctgtaaatgaaaaaagagaaaagggttgtgagcattttgtttctttcctaacgatatatgctaatttggggaatttgagcattaaactgaggcagaaattagagaaagaaagaaaaataaaattaaaaagagaaagaaataagatttctgtgttacgctgataatcccaaaggcagtgacaggcaaaacccagacccaggcaaaagttccaataatgttatctatgaaaccagggctcaaagaaatgtgctctggagactctcccagcactccctcaacatagggagaagaaaaaacaaattttcccttctcttatgatgtgagtaaacctacgagtttatggatttctgttctctgtaactagtaccttcaagtattctgtttaatctaggcggcacaatgaaggtcatgagaagcctgcgcaggcctgaactacagccacctgggcaccatagcgaatgttatgagataagcccgtgcaaggcacttaagtaaaacctaggtaacagccatctgagccgcatagcaggatgtcatatgtaatcctgagttatgcacctgtcacaatttgattaactgtctttgttctgcttcgttctgcgcacttggcttttgcgccactacgcttcatgccagtgtaagcttgcttcaaactagccaacccgctttttgaagtgtgtataaaagccaagacttgtctttgttcttggctcagtttttggatgttaatctgctgggcctgactgcactcaataaaattctcctgtctcaccctgtggtctcttcagtccttcattcccgcaacaaaacaagatagccaaaacagatatgtgctttcctggagtttgtaatgtaagacatacaatagcaaataatgacaaattataagtgagagacagaaaataatgattagttcaaattagctaatacatcaaactgtgataaatgtttttgcattatttactggtacaactagcaaacatttttcgagaatatttacagctgacagattaatatgtattaaattataagaacatacataagaacatgtgtgggtgtattggtgtgtattttcgttataatgaaaagcagtagaaacacacaaattagctcagtggtcaactctaaaagggcggcaggggtattgcctctatgatgagcataaaggtataagtaatacttcaatggtataagtaatactgcatttattgaattactgacaggttgatattatccattttactaagtattattgcttgcatatatgctgttgttatttgtactcagaaaagatttataatttgtattcttaaaattaaggagtaaaagaatattttaaaaattaatgatgaaataagaattgtataagaaaggtagccatgattaattgaatagaaacactgcctgggctcttatctcactaatatttagactagaagttggactattactgaaggacactcatttatagctaccgtagctaatcttgctcacttttacatccttattttctttcccaaagcacagtcttttattcaaaatctaaaaaaggaaaagtagctctttcatcatcatgcattctgcaaatataactttatgaaggcataaacatgggtttgacctaaatattttacttaataaaatattttatgaaggaaaaaatatatttcaaaagactttgaacagtgaacaacccacttggagtttgctagagacaatagcatgtaacttttagagcatgtaaactctaaaatgtatataaaggaagagataaaggatttacatcaatagaggtaaactatattatttaacatgagattttaattcattaaaatgtaaacattttcaaacatattaatgcatgaaacaaactcaaattcttgaaaaattgacgtgagttgcaaaaactttctctagatttcatatgacatatatgagtcctaatattaggaaatgcaattttgcagccaaaaaatctgagtttttgaattctgttgtatttccaaaacatataaagcagctgaaatagtcaaaaccataaagaattttaaaatctgggtttaaatatgacactggatattgataatgactatctcttaactgcaaagccagatcagacattagctccaatttaagcaaaaataaatttcagaagtaaaatatactttggacatggcttattcaaatatctgtatgtaagggaagacaattagtctcataaactttcagttttaagtaaactggtgcacactgtgcttatttaaagtttgtgataatacttattgtgaatgatattcacagtatatcacgatttctgtggaccatataattcttcaaagaacagttaaatttgaagatgaatacctgtgtctagccactatcacctggatatttctgccttgtttacactaacaagcttcaaggaaatatcctaatgagatatcttgctgtgacaatctgctagctaagctactccgtgcagaccaatgtcattattttaaatatatgtacccctgcctatgaattcatgatttccattttacttctgtctaatcaagcttatgtatatacccatgaaaaaggaacccagatgcctcaaaatgatctaatcctgatttcagctttgcattgtaaaacttttgcttggctttgcatttgtaattcaatttgctgataaacaccttggacatcttttcttttaacaatgtgcagcactgatagcttttgtccattctcctttatttggtgcatttaaaaaattatgagaagttcatttacttatatatctctactacaaacagatcagcaaaggaaaggaaacatagcatatattctaacctaattttagccaaaaattcctcataaagactatcagcatgtttcttattttagctttaaaaaactgtgattttaaaataactaactttctgagcatttaggatctagagaagagtcaaaatatatatgacaaataattaattttgcccaacatctaaactagtggtactcaatttttttggcagaaactcatactaagaaatgcagtttacataccaatctagttcacacataaacatatctacaataacacttccctagaatatagcaaaactggttgtttcatttcgtgataactggctctaaccagttaaagctgataagatgtcatgaatttgagtgacctgaatgaacatttatttattacaacaaactaaggagtctttcctgatgaatggacagtgcagacgtataaactcatttcacttaatttggtgttctagtttcggctgttaattagcataactattatgaattcccttttttttaatcacttagggaaccctgatcgtatgctgcagagactttgtaaatttcttaactgttgagtgttcccttgcctggcaagttaatagactcagcagctttgtaattattattacaggtaatagtatgattagtcgtagtcatagtcgtagtcgtagtcgtagtcatagtagtacttagccctggtcttattttatcagacattttaggagatccaccaaaattgccttgtcggcctcacttagtggtgctggtgttgccagccttaagaccggaaacaacattcttacctgtgccttttggtcctctgttttggtcttcaggtacaattgcagtggtgactaactaagatttgattgttcttggagacccccttaaatttattacatttactgggacggtttgaggagctgtagctctgagttaccacagctcatgacttatatatgattttttttttgagtcagagtcttgctctgttgccaggctggagtgcagtggcgcgatttcagctcactgcaacctccgcctcccaggttcaagggattcccctgcctcagcctcccgagtggctgggactacaggcgcccgccaccacacctggctaattttttgtattttagtagaggcagagtttcaccatgttggccaggatggtctccatctcctgatcttgtgatctgcctgcctcggcctcccgaagtgctgggattacaggcctgagccaccgtgcccggccaatatggttttgaccatcagtcatctgtcactgagctttcagtcttattttgtttcttatttttcggtgattgcttgggaaaagagaatcggttgctctcttttctggtgctttcctaagtctgtcttgtagctgtcatagataacgtttcggtctgttatgtggttaatataggaactacagtgtcaaaccgttattaccctgtaccctcactctcctgtggggactttttaatttgacaacagtcggacttttaaattgcttttaaagtctgtcattatatatgcatagtccaggaatatctagcccaggtccacataaaactaagtagaaaaaaaacaatgaaactgattacaaagtctcttaaatttcatggtaactctaatgctaattggtttactgaaacttataaataaataattttaaaatagcacaaagttcacaaggattttttaaaattaattactaatgcttaaaatgtctagctggcttcttctaagaataactgcctggttgtgtcttttattatgggaacaatatcttttttttctttttaaaaaaaggaaactttagctgcattaaaggttaacacttcggttacttatctcttagttaagagagaataaaaaaggcaagtcattcggtgactaaaaattgttctatatttgtaaaaaggtattaaatttctataaatataactaatcaaagtaaatcttaaaaaattaaatattttttatgaaataattgtcacttcaaatttgctgcaaattggataaggctaaagaaatattgtaaaaaagacatttttttcttacaatttctggtatctaatatgttatcttgttctttttaaggctttattgagatataattgatataaaaataactggacattttaatgtatacattttgatgaattactgtcttttgtgtttgcatgctgcatgctcacacatctgagtgagtgtgtgggcgtggtgaaagcacataaaatgaaatctatcctcttcaactttggagtgctaaatgttatattgttaactataaatataatactgtacagcagatctctaaaactttttcatcttgggtaaccaaaactttatatcaattgagcaacaagtctccatttccgtattcacccattccctggcagccaccattctactctctgcttctatgagtttgactattttagatatcctgtgtagacggaatcatgcaacatatgtctttttctgactggcttatttcacttttcataatgtcctctactttcctccttgttttcacaaaagataacattttcatctttttaaatactgaacaatattccattgttcggtgacatatcacatcttctttatcttcttttttgtcagtggacatttaggttgtttctatattttgaccattgtaaataatgctgtagtatacatgggagagcagctacctctcagagattactttgattgtgctgatggtttcacagatgtatgcgtattttcagactcatcaaattgtatacactgaatatgtgaaggcttttgtatatcagttacacctcaataaaggtgtttaaaaaaacaaataatttgtttgattcaacgcaggtataatttgctacacaagttaagctgttgagtttgtcatactttttctattattgtaatattctgctaaaattattacaactacagttttcataaggttcatccagagaagtttattttcccatcagcccaatattagcaaaattggtaattacttcttcaggctcaaaccttccagcaaccaatttttttagctaaaaaaatctttagttaaaataagcatcattttatagcatatgactgttattaccttatttcttatatgacatgaatatcatagttataaaatataatattctttctataaagccagatagcttaaaatattgacagttgttccatatcacaggaaatcactaacaacatgtttgcactcaactaattaagaaaaaaacgtccttgaactgtttgaactagttacacttgtcctgctgtgaatttcaaattatttggttaaaacaactctcaatttcctcagataactacaaaaactatagattgtgctctttatgacttgcatatgtatgcaccgagatatattgtatcacaatattgattgtggagataaataagtctactatcttaaaagagtttatatgctctgttgaaatttttgtaagtctataatggtagtatttcacatgatctacgtacatgcctgttgaagtataaaactttcaggctgtatcagagatatttgtatccactgattcctgacaagttttctttattggccttgatactcctatatttgaatgctgcattgaagctctatgacagaagcaatcatagcaaaggaagccatatgttgtccctgagatacaggttcaacaaaatttcttgcacattttttcttgcaagagtactgaacaacagaatcactttattcacaattccaaaacagaatttacttatcacaatattttctatactatttagtctcctgtttttatttggataaatgctccaaggtaagtgttgagagaaaaattttcacgtatgttgcatgttgctgtttgtctcatattaagagccttagaaaatagaagggatgtctccttccagagtgaagggtagatatgcttcctacccattataagagatccacattccctaaagctcagcttctctctgaacacaactcactgtgtgtgctggcttctacctgagcccatgtgtttcttcccaccggactctggggcaagggaaagtaacccatatgtatctccccattggactctggggcaagggaaagtgacaggaatgtacatatgcttttactgcttttgcagcattatcagtaataatgtcctttgtctctcacctagaaatattttatcttctcccattgtccatgaaattgtggcaagctaacttgttaacttgtaagtagattaaatatttaaccctttgaaatccttgattgtaggttaagaagactctatgtaaaattaataaggaagccaattgattttccaaaatatgacacacctgcccacaggattttttttaatgattcagccttgtacaaataaaagaatataattaattgttgctgtgatcagggtattattaacagttttagtagagtaactattttatggatagtgcattaaagtgaaattgaagctatatggataaacaaaacatatccactaaaaattgaaacccaagatctaagtattgaccaaaaatatctgaccatatatcgttccttgtatcattactctacaatagagattaaggaaaggaccataagaaaattgttgcttactttgaacatacagcctatagtggcaattccctatgaaatatcaaaaatgattattgtgtttatcactgctgtcattaatcaatcaaagcttgtaaaggaccatgactattgcatatccccaagattacaaacccttactggacacaaagtgaagactttttcctgatcaatgaagagtaaaattcattttatccaactatatgcaggtcatttgatttctgtcctctccaggatactaatttttaatgcttaataagcacagcgttcatgaactctcactttctagcacttaaaaactgactttttgccttctgcagatgacttggtaattttttaaatggtgcatgtgctctttcatggagttaatagaactcagcattgtaaaaatgtttaactctggttttgtgttaattcatcaatagaatatatctgaaaataaattcatgaatcaattatattgttactattatgatacggtctaatatttataacttattaaattttattttaaataatactgatgatgaaccttagttgagttcatgaactattagtagattgtggcttgcattttgaaaaacatattgatattagttccttgtcacttgtatttcttatgcaatttattgggtcagactgatgtttgagtctctgttccaacacttagtagctttgttaccttaaaaagtatacttaacaaccttagcctatgtgattatacgtaaaacatgctcataataatagttaccacttaagtttttttaagaatcatatgagaaaatttgtaaagtatgtaatacagtgcctagaacttaacagttctcaattagtattttaccatgattatgatcatagaattaccatgagtgttattaatataattgtaataagtgagaatcaatttttgaaattaccgtattaaacagtgccattaattgtaaaggatattttttggcaaatgaaataacactcacataccaaaaatgttaatttataaagatttcagtgagtcatgtaatggattagttcttcgttggtaattttatgagaattaaataaatttacctgtagctagaaggtttgcctaagtgtatattcaaatctcttactgtacctctgggaccatacaatgttctcttattttgtagaattattaagcaatataatgtaaatgaaagaatcccgcttcctttgacattctttgaaccttaataaggggttgccttgttatggtaataatatgagatatgttaaattattctcttataaaatttttattctcaaggatcttctatctgttataaggaataaaatctatgttgttgccagtgcagctttttatctgtgaaggtcagatacttgatgaagtttctagtaaagctgcacactggagtatttttatttaagtttgtaatgggaggaacatttagattcgatgagtaaagtgatacagaattatttataaaacttgttgacattagataagatgttaaaaagatttaataatataatctataatatattctataataataataatataatctataatatattcaagaaggacaaatcaaacagcttagtataaagccagttgcaaatgtgcagaatttgattaaattacatcagccaacggaactctgatccatttatatacatgtcccaggtggaaagttccagtgggtgactaagatagcctggattttaagacaagatgtattgaaatcaactttacatctgtacttccagactctgatcttctaagaaaatatggtattgaccaatgacatggagagctgcctatgtgtttttcttctacaatcaacttgtgaacaatgctctttactttcattatattaagtgaactaataactttacatcattttactgaaggagaaaataagcaactttggaatttcacatagaggcaattttgaaaattaaaccacaattagattatttacatttaaagcatataaattgtatatgtatatacatatatatatactttatatgtatatacatattgtatatgcatatacaatttatatgctttaaatgtaaataatctaattgtggtttaattttcaaaattgcctctatgtgaaattccaaagttgcttattgcatgtaaagcatataaagcatataaagcatatatacatataaagcatataaattcagaatgtaatacaactattctaatttgggaaataaattgttgacaaataacgcatgcactttcagcaatattttcaaacagaaacaagttttatataatgacagatatatttaattaacattggttattataatgttttggttgttttaatgtttgcaactctgaatgagaagaaactagctttgatattttaatttatccattacaaccacaagtgaatccccaaaccccatgttatttgtttacttttgttgatctacttgaaagcatcatgccattgtttttttaatgcctaagactgcttggtgaatttgagccttcaattattttaattatctgaaatctctaacgttttcacttttttcttatttattttgtagtttaaaggttaataaaatgttttttcattgtgaattcagagaatcatggattgttatccacggataagataaaaatctattatttttatcatggattcagagaatcagcacattcagctatgctcattattgtttgtataaaagcaactgactctctaagaaatccttattacatcatcattttagctatttttatttattaaaaataatatttgttaatttagtgcattgcatgcaatcttaatgtgctttataaacgcctagataatttaatctttaacaatgaagtgaggataactttatacatgattattcgctcagcaataaagcaaaaaaatttgaaatatttgttaagatctactaacagcaaaaattgctaagcacttgaaaatacttacaactaacgttgtgttacaattaatgtaagtgtttccactcagatatatgagatccccctgaaagttataaaataaagagcttttataagcttttgatgttgggtaaatttggtcctaggcaactgttctaatattttaacattttaaatattttaataggtggttcctgaatttttaggatataaaacatcatttaaaaataaatcagtaataaaatatttagcaaatttgttttaagagattttaagaagcacagtttttcctgtttttttccctccgtatattgtacccaaagtcaaaatgaaagcctcccactaagatagaaacaagacaaagatgcccactttcatcattgctattcaacattatattggaagttctagacagagcaagtgggcaaggacaataaataaaaggtcccccaatttaaaaggaaaagataaagatatatctattcacatatgacatgttcttatatgtagaaaaatctctcaaaatccacaagaaagttactaagaaacaaattcagcccaattgccaggtgcaaaatcaacatacaaaaattgaatgtatttctacacatttgcaatgaacaatttgcaaaggaaatttaaatagtaattcactttacaatatcattcaaaatattaaaatactttagaacaaatttaaccaagaaagttagattaacaaatattttaatatacactgaaaaatataaagcactgatgaaaaaaactgaacacttatttaaatggaaaggcagcccatgttcatggggtcgaagacttaatattttaagacatcagtaccacatacagttacctacaaattcaagctaatccatatcaaaattgcaacagccttttatttttttgcagaaatgcagaaagctgatccttaagttatgtgaaattgcaaggggatccaaatggtcaaaacaattttgagaaagaacaaatttagaggactcacaatttctaaattttaaaaattattccaaagaagccctaataaaaaccatttgggatttgtataaggatagttgtatagatcaattcaatatttgagtcagaaataaatttatgtgtctattagcagccgatttctgaaaagggtgacaagtctataatagaaaagcagcatcttcatcaaaatgtgttgggccaacgggacttccacattgagaagaatgaagctggtcccctacttcacaccatataaaacattaactcaaaatgaatcaatgatgtagatgtaagagttaacatcaaaaaccttttagaagacaagacataggcataaatattctgggccttagatttgtcaatggatttttacatatgacaccaaagcatgaataactatatatatatatatatgtatatataattaaatatatatgtatatttgactttcaagagactcatgtacctgttcattaagcatcaattattgtgaacattacacagatttaggatttctttaagaattctattttttagccgggcgcggtggctcaagcctgtaatcccagcactttgggaggccgaggcgggcggatcacgaggtcaggagatggagaccatcctagctaacacggtgaaaccccgtctctactaaaaacacaaaaaattcgcccggcctgctggcaggcgcctgtagtcccagctacttgggaggctgaggcaggggaatggcgtgaacgcgggaggcagagcttgcagcgagccgagatcagatcgcaccactgcaccccagcctgcgggacagagtgagactccgtctcaaaaaaaaaaaaaaaaaaaggaattctattttttaaattgttattgtggttaaatatgtataaaataaaatttcctattttaccttcttctcaatggataatacacgagcatgcataatacagcagcaatgtataatacaaaagcaatgtataacaggacagattgcatccaaatgtagaagtatgtatatacatttgaaagtcaaatatatatatttgattttacaaaattaaaatattttatttattaaaggatatgatcaagaaagtgaaaaagtaaagctacagattgggataaaatatctgtaaaacacatatcttatggaaactaaatacctaagatataaagaactcctaaaactcaacaaaataacatatgagccaatttattaaatgacctaaggacttgataaacatctatacaaagaagatatacaaataagcacatgcaaacatgtccaatattattagtgtttagggaaatctaaaccataagatactactttatacctactaggatagctataataaaataaaagaaaataacgcgtgttggcaaggatgtggaggaattagaacaattgcaccttgctggcagaaatgtaaaatggtacagtcactgttgaaaagagttttatggtctctcagaaagctacacatagaattaccacataacccaaacaattttagactttgttatataccccccaaaactggaaacaaagtttcacatacctgtatgtcactgcttattgtggcattattcacagagccaaaagatgaaaacaatccaggtgttcatcaacaaatgaatgaatggacaaaaggtgatgtatacatatagtagaatattattcagccagaaaatggaatgaagttctgatgtattgccataacaggtataacctagaaaacattataccaaatgaagaaagccagacataaaagggcaaatattttctgacacacttgtataaaatatctagaacaagtaaaattatagagaaagagattagaggttctcaggggctgagggaagagagaatggaaagttattgtttgttatgaagttctatttgggtgatgaacaagttataaaaataggtaatgattatggtttcacaacattgtgaatgcaactcatgcttctgaattatgcattgagaagaaggtaaaatagaaaattttattttatatgtatttaaccacaataacaattttaaaatagaattcttaaagaaatcctaaatctatgtaatgttcacaataattgatgcttaatgaacacatacatgagtctcttgaaaggcagaattaacattcaattaaactttcctacttcatagcagtgtagtatcttctttgaaattatttatattggcatttattactaaataaaagcgtatattacttgtaactgataagcattattatatgctggggaaatagaaggtaaaacaggattgtatgtctcaggaagcttcaaaggaagaaaataaatagggtggaaagaaggacagagagagacgagagaattgagagaatcattttcttgagagacaagaaaatatgtaattcaatacaaagatcagatagcagaagaaacagctactttattatagcagaacagattgcatccaaatgtaaaagtatgtatataaatttgatattcagagaaaatgactacatgtctaatagaaaagatagaaatagattttgaagggtatgaacaatctttgaaagatttgaaatagaatgaagattagttgaccagatatcttgcctataattgaagtgatgagggattatttcaattttgggatgatcattttgtagttggaataatgtgtcctgatattttatgtagacagaaatcagatagctttttcttcagattagcataatggaaagaaaaaaaggcatgggcctttagaataatgtaaaaaatcttattgaactgtgagccatggaatataagctgaaaaaagaatcatactaagaagaggatttttgaaattggggataacctatggcttaataaattcaggcttctgataaaatcagagtaggagtatttgaacaaataagctgtaaggtggaaagtaaaggagttaaggaattgaatatttgcatgattgattttccagctaaaataattataggtataaaaaagatatgtccctggaataggtatctgaaatgatggcgaggaatagttatgagaaacaagaagttcaagaacagaggtatggtattggatgcatcattcactagaagttttcaacgaagattataaaataaattaaggttgagaaaaagtctgtgggcctgttgccaaagttttaaatatgacaacaggggccccaatattgaatttcaaagatgataacctcaggtaaaggaaaaaaattgttaaaattgaagtataagatcttaaagtgagtatgatttttttatttaatttttcttaggggaagtaattaaatagtaatgtacaattgcttaagtcttttgtactctataccaattataacagaattcaggtcatagactttttgtttttctgtctctccgtcattgtctctcttgctctctgtctctttctctatatatacacacatatatggaaatcaatctatctatatattccacatatatatatatgaaattcaatatatattagtctgctttagtttctcctaacgccggaaaatacaattgcaatatatataaaatgctaaatatgagaattatagtcaccctccatcttaaagacattttcatgagctcatgaattgcaacaaagtttaataagtagtattttctccaaacattttacatacattatctcatttaatttttaacaacatctgagataaaaattttaaaccagttttggacttgagaaaaagaagacttaaaatgcctaaataatttgaacatggtcacatggcaagtagaagtaatagttcagagtgaaacccaagtgtgcccagttttcctgaaccaaaatctatcttccattttgttattcttcctaatatgactagacagatatttcttaatataaaaaagtttcttttatatataaaaagttattttagcaacaattataaaacaaaacacattaaaccacaatgaattgtaggttttcctaatgaacacaatttgtagcagttgtacaacatattaggtttcttaatttagaggacatgaaaacattgttagaagtacaaaaattacaattacaagaactttgctttgagaataacaatcccctttgtctcttttggtttgtcttttcctctgtcacccctagcctgttagcattgaatgagaaagctaataaatgtttctacataatcttacattgcctacagaaaaagtttcattatatcagcatggttttcatgcgattttaaactgtatctatgcataccaaaacaacagacaaatctagctcatcctattttattaaattacaaccatttacctcttctttttttactaaatttgaccaatcttccaaactccagctaaaattctaccttatatatgaaaactttctcaatcctatcaaggagattaaactagtgctttcttcgggtccatgatgtatacacttcattactcaatttttcagaatttcgttcattcttttagtcactcacccatgcccagatacaagatcattagctcctcaagattagagaatgagagtttttatacttagcctccagcatatagtacttggtagctgcataaaatgtcttcactgggacacaacttttgtctaaagacaaaaagtgattagattaacaaaatcaggggtgattttattcatttcacaaaatgcctacaaggtaattaagatatgcataattagtggatagagaataaaatgtctctgaactgcaaggaagaagtggggaaacatggaggttcttgacacaccttcataaacagtcacatatctgggagatctggaagccactgtttcgaaggcaggtcagtcttttgaatagtgtccaatctgtatttaaaaatgtgttcattagaaacctctggactgaatggtgaaagtgaggcaaggcctcatcttgctggaaaatgggataagtgaaggctttctgtagctacagaaaaaaaattccatgagtgtgtccaaaaaaacaagtacccgtgatagtaccttctactacaaggatttaattaaaacctgtgagcttcatgtgacacaaaagacatttagtgaatcccttacaagtggaattgtgaaatgttggttttcagtgctccatgtgtgagggtgataatgttatttttctagtcaaaggtgataatgattcatttttcctacttaaataaaacagcttcgtcactgacagtcaactccacttccctgggaccctgaaatctgctgcaaaacttgtatcattttacttcactgtctccactggggcttgaagcattttaaggcaggttttattctctatttatggaaaatgcactacataataggctgaagcttgcttaatttccatttcctgggacttctctaaagaagaaaaaaaattcgcctcactgcttcctctgcatatggggctactctgcacactgtcttaagatacactctttctgcttcatctcactatacaatgggaaatgctttgactacctgataggtgttgctgtctggtacacttaattacttttgtactgcagtcattacaaccaagtttacaagattttgacatatgaaattaagtgctataagggtacctacaaattgatgggtattacatgtttacctattaatatgatactaatacaatttttaaaatattaagaaatggtttatgaaatttagtaatgctaccaaagttaaaggatgtcgttaattacatgtaactttgaattctaaattgatagttaagcacagttacatctttccacccatctgagctcttaaatatggtaataacttattgatgtgctaaacatagaactgtattacctactcatgatgccatgatttaaattttgagtctaggtattattattttaggtattttatttataccttgtcttgattcaagtgcacttatcctaattgaatttgattttgtctctttgtaaataatttcaggcaaccatttgaattctgtttctcttgtaatggcctacatagagatacctcaaatgaataaatgtgccctcctctatcaggaagagagtgttaacaattctgaaaagcactactaataatatcaggtgataattgaatcaaaggaaactgctgttctcttcaccgagatgtaagacaattgcattaggcaatctttgaaaattttaattagtatgtgcgatattctgtgtttagaacctctggatctttactggcctctttgaaacaaattgattgttaaagtccgattcttaaagaggaaattgccagatcacacagtagatttcacaattgacatgactaccttcttagcattcttggttgaagagacaaatatagctggtagatacaaaattaactatgtatttattactttaagtccttgctttattgcttctcagccttttggctaagatcatgcgaagtccttgctttataatatatacaatgaaagttaagtgagtaatctctgagttagtttgtgatttgtgtgtatattaatgtttccgtgcctgggaactgttaatatgataacgaatgttttacattaaattttattttaatttgaggtccagaaagacttcataataaactaaaacaaataccttttgcttaatctttaaatttaccatttgtccatgcttccttccccatttttttttgtttttgtttttgttttttttgctttggcccggataaaaagcctcaaatatgtgagaataaacccaaattgatttctataatgctttcaataaaaaggcagtttatctggtttcagcaagtacatgcagcagcagccagtgaattctggccctgggttggactagcattgggtagccatatatcagaacctgtataaattaccagagtttgtaaagattgctttaatagccaggcacggtggctcacacctgtaatcccagcactttgggaggccaaggcgggcggatcacgaggacaggcgatggagaccattctgtctaacacggtaaaaccctgtctctactaaaaatacaaaaaaatagctaggtgtggtggtgggtgcctgtagtctgagctacttgggaggctgaggcaggagaatggcgtgaacctgggaggtggagcttgcagtgagccgagattgtgccattgaactccagcctgggcgacaagagtgagactccttcacaaaaaaaaacaaaaaaacaaaaaaaccccacagtgctttaatataaaatgcccaatgaatgaatatgagaatgtgctaacctgagttaggtctcctatcctatctagaaaaacaaaatatgtttaaagattgaatggtaacaaaataactcctaaccattgatactcatttcctaacacatttatttattcagcatgcatttatcaattttgttcctatatacaaaaatagagaaacaattgtaaacaaaacacaaccaattccttcatggtatggatcaaatatttagactaatgaagcctaggcaaatattttgatgtattactgcagtttattttaaaatatagtaatttattttcacacagatctcaatatctgaacttactttacttcatccaatattgcccagctcagactttgtttttttttttctgaaacccagaaaacttttttaaactgtgtattagacatttacaattacatgagccacaagaacaagagatacaagcttcctaaactcaagtcattgtcttaccaagaaaacttactccttctttggcattctaagttatgctaaatgacaacacacaccaccagaagctaagatgtcaccattgattccttctaattaccataagcctaacacagaatcaatcaccaggttctactaatatagcatctaatattgtcagaaaaaagcagacaaaatatgtctgcctaaatgaagattagatggataacgaatagagatgtagagatacagagaaaatcaacagcagatttaagaaacaaatatctcatgtagtattatagaaagaaacaagtgttatggaaaaatttaaaaatacaattgaatagtctattttatgcaattagagaaacataaaaatttcaattttattatgtaattatttcacttcatgctttttgacttttaaaattaaaatatttattttgtgtattgaacttataattttaagttgctttatttattcttaatcttttggttcaagataaaaatggaacagaagagtagatttacatatttttttaaatgtcctactttcaatttttgaagcctcataactgatttcttcctcaagagatgtgtttgaaaatgacacaaagccactgtctttattcatgtttctttccggcgtaattgctctgaacaatacgtctttatcttccgtttttagttgttaggtattggttcctgcgaagaaaatagtctttcttactaagataacaaagtgttgtttgttataaagacttcttcaaatgaaaggtctccttttctactgtttttgttgaaaagtccctttaatagaaaatccatttatccctccctaaacagacgctactttggttttctgaatgaacaacccaaaaaggtatgcaatatttgttttccccttaaacaaagtatttctagtgagcatgttatatttatagcttgatcgacattactaagcaattgctgaaatacatttttctaaagaaaagcttctttgtagctttagcgtaaagtctctcaatatttcagtctgtgaaggaatagatggataaatgagcttctgtgaaataggttggcagaaaaagatatcttacgtttttatgttttgtgctaagccaatatggcaatagagtattattttgatatacaggaagatataaatgcctcagtttattcaactaaaataacactgtcttgcaatctttacataaaagatgaaaattattgctcgctcctctctctctctatgtgtgtgtaaatatatgtatacctatatgtacatatatgtacctatatttttatctatctaatatccacacatcacaaaacatgatgcaagttgataaccactgattatgtaaaaatatgagtgtatacagaaaactaaacaaaatagctttctaacttatacagaacattttcttttgcaattcaagtattattttctttcagcataactcagcagacttaggcatttgcagattccactcagagtaatggaagaaagtgcggtggaaggaaacatctatcaagtgcctgttttaagctattcaccaagataagggcttccacagtttacatacacttggtaacaaccctgacggatgttagacaaaatctctattttttttttacagttcagataatttttgtcccagtaaacaattcataaaagttgtcactgaaaacaatagataaaaatactcacaaataaaaatactctcaccaatgaatcctcaccctaaactcacatgagcactgccaacatttttatagatctatttagagactcaccaacatatttggaaaacaaagtgttctatagatattagtcaatacaagtaaaagtagttactctgagaaataataggtacagattcaacttcgtcccacataaaatatggcctcctttttcatgctcactttcacatctgtgatttatacgtacatcgctctcccagattgctaatgcctgggctgcttttagcctccagtttgcctctttccaaacttacagagcagtctttctgtcatagaaagctaaccatgccactcacctgattcaatgatttcaatttctgtaaagtaaaattaaaattttttatctcagtgtaaatggttatccatgactttccttttgcttaactgagctatcattttcttcgtagtttcttccatataaccaacatttaaatcttattaaaacccatctatattttttagattattatcctttctcacactctccccctctgtgatactttacctaactctctataatccttcaagattccaatactttatgaatttcccttgactccttaaagtggtattttcttatttctctgtaatccttgactcagtcatagttcttttcacttggtattttcgttgttttgttataccttgcgtattgtacctctattttagtttgcatgttttggattatatctggcaaagaggactattgatatgtgtaattaaatagcttcctggaaaagaactctactttgggtaatgagttagataaagcaaaaattcttcattgtcagaaaaaatatagtgattttctgcttctgtttctttctctgcctctcatatacatgctccatccttctgtccatatgctaatctctgcagattgcatctctcaggcttagttttcagcagacttcaagttaagtttgacaaaaaggaggcatcaaaagaagataaaggggaagaagagtatagaggactggagtattttgtccttgttttcctcctgttgtcccttttgggtgttattaacttccactgttgcaagtctttgtgatgaattctcttttcctgccaggatcctggcttttaatcacacaaatgtattgcatggtttagtgattgttagaagagtgtattagaaaattgagagcagaaagacaactcaacattgtgaggagtatttcaccaaaactcagtaaaatttgtatagctttacatgttacacttaagcctatgatacattttgatgatacaactttttctatcactttagttttgatttacctttgctaatgtgtttaagtgtttgtatagatttcttaatgcttgttctagtgtttctatgcatgcacttatcgtagcctattgacatcaatgtatagaaaacttactttaatttagatctatttaatctcccattttcaaaattcacagttttcttaaatatgttctctgcatacattgagccccgtatcaattgagttataaattctgtttccaccattaaatctgattaagaaactcatgaaatgaaggatagtctatatgtttacccacattgttatacattgttttatccttgtctgaagtttctactcttttgttaccactttatttccattgggaaaattctttttgcatgccctaagggtagatcctatggtggaaaaatttcttagtttttctttgagaatggctttctttttttgacctctaaaggatagcttcacctgacagaagatttactttggcaattgtcttaatttgaaggttaaaaatgtgttccactatttgcttttggtctcaatggttttggatgagaagtgggctgtcatttgaagttacattcctctagagattatgtgttgcttctctctggttttcttaaggtttttttttcctatagtttttataagtataatttttgtctgtcttgttaaaggtttcatttgtttgtttttaatcatctttggggtttgctcagcttcttaagtatgtgggttcatgtcttaagtttgggtgttttcagatattatttcttcaaatgtttgtcctgccctttcatttttccctctccttctgggaccgcaatgatatggatgctaaatcttttgttactcttttacatatcatttacactctgtgtatttttaaagtcgatttctctgtgttgttaagatcgagcaaacactattgataagtcttctagttcactaattctgttctctgccatcatctccattctacgatcaaactcatctagcaaggtttttatttcaattatttcatgtttctgttctatgatacctgatagagtcatttcatggttgtatatgttaaatgatgttcaggatatttaggtgtactttgtggaagaagtgggtgaggaggtaatagtagaaaccagaaaaataaatctacatcaacttttcccaaagtcagaagtctaattttgactttttaaagtttcaaaattagctgcaaaaagatcttttctgctaaaaatactacattatacatttaactacagaagttagaattattattgcaaacagtatacttctcttcccctctgctttatttctaaacatcaaatgatggaaataaagtagaaatatagatatggatataacacctttaccttaatcttttatagttgtgatatatatagaactcatgtgaagtgttattcttatggctccacagttgataggcacccagagtttccagaaaagtaaaatcactttatcagtttcataaataaaatttcaccaaacttatttctatatggcttctcaaaacctatggcatggatattcattcatatgataacataacaagggctctgaggatacagtttttgtgattctcttttattaaacatcaaaaagtgtaaagtggaaggtttatggtgaagactcatgtaatgtaatttaccattaccatctaacctctctctctctttctctctctctctctcaaacacacacacacattttcaaaagacactctataaaagatttaggctatcatgcaagttttatatcagcaaattcactaatggcttttaccagtgaatccctcaggagtgcatctgccttttaaatgtcaaaaaacagctcttaaacttcgacaaagtagaaatttggtgtgaaaagtctaagcaaaagttgaaataatatgttttaaaaaatattggccctaacagttcaacaaccttactcttctatggtaagttaaacagagctcggtgttgtaacccacattgaccatacagcagcttactacatatcaagatgtatgacagcatatttgtcacatagtctcaaaagaaattttaaaaagactatactaaattttatcctaccaacttccttccttattaacatgttttccaagccagatgttatttttgcatattcagagtcacattgtattgtaaaatataaaagtagagattctctcaagataacctatttgttataatcccagttattttataaaatgaaaaaaagaaagaaaaaaagaagagtctttaaatctctgtatctcaatagtgattttgagtcagtgttgtgagatattaaacaaatgcagggtttaacatttggcatatgttttccaaaatatctaactcatttcatttaaaaactaaatctataaggtgtgtgctattattttcaccactttaagcacaaagatataaatacacaacaataaattgtctttggtcttgttgctagtaagtggaaaagctgggaattgaacccaactaagccttcactcccaccataacattcataatctattttccttatcttgatcctattgttctgaaccattaaaaaatcacagattttatccttgtgatgaggagtcactgaggagtcacagacttttattttttatacaaaattcaattgcattttctgcaactattttgattaagaagttttcaaatggcccaaatccttttgactagaattcatcttcattacattagtgtgatttatggctgtaatttcatgggagctgactcattgttgtatcctaatgatactctttggctgtgggcatttaaaagtgcaatgacttctccattcttacctcacttgatcttttcccaaactccagtgtatcattagagaggatcatgcaaatatttttaagtgattattttcaaatcagtttttagtaaacattatttttacttgagatcagttttctcagtatttatttatttattcattcattcattcattttttgagatggagtctcattctctctcccaggctggagtgcactggcacaatctcagctctctgcaacctccacctccgaggctcaagcgatactcccacctcatcctcttgagtagctgggactacaggcatgttccaccatgtccagctattagtattatttaatgagctattcagttgaactgttatttattcagtaaatcacttaatcaacaattcattattgaatatctacaataccttcaaaaagacaccagccaattataggccattaaataatttaggaaaataaaaaattaagtatgctagattgtaataagagcaatgataaatatggaagagctcttgcataagaacctgtagtcctgactgaatagaggatagcaataatttttctatagacatctatgtgttgacatctcgctctcatctctctcttctttctctttttccccctccttattccattttcatactactataaagcactgcatgggactgggtaattcataaaggaaagagctctcattaactcacagttcagcatggctgggaggcctcaggaaacttacaatcatggcaaaaggcaaagaggaagaaagtcaccttcttaacaaggcagcaggaaagagaagtgccaagtgaagcagggaagagccccttataaaaccataaaatctcattagaaattactcactatcatgagaacagcatgagtgaaactgccccatgattcaatcacctccagctgttctctcccttgacatgtggggattatggggattacaattcaagatgagatttgggtggggacataaagcctaaccatatcattttgcccctagaccctctcaaatctcatgtccgtttcacatttcaaaaccaattatgccttcctaacagtcacccaaagtcttaactcattccaacactaacccaaaagtccacagtccaaagtctcacttgaaacaaggcaagtcccttctacctatgagcctgtaaaatcaaaagcaatttagttacttcctagttataatgaggttgtaggcattgggcaaatacactgttcccagtgggagaaattggccaaaacaaatgcaagtctgaaatctagagagtagtcaaatcttaagctccaaaatgatctttgacttcatgtctcacatcctggtcttcccaatgcaagaggtgggctcagatggcctaggacagctctgccccatggctttgcagggtacagccccacttctggctgctttcatgagctggcattgagtgtctgtggcttttccagtacagttcaagctgtcagtggatttaccattctggagtcttgaggatggtgaccatcttctcacaactccactaggcattacctcaatggggaatctgtgtgggggccccgaacccaaatttcccttttgcagtgttctagcaggtgttctccatgtaggctctacccctgcaacaaacgtctgcctggacatctagatgtgtctacatataatctgaaatctaggcagtagttcccatacctcaatttttgactcctgtgcacctgcaggtccatcaccatgtgtgagcagccaaggcttgaagcttgcaccctctgaatcaatggcctgagctgtgcattggccacttttagccatggctggaatgcagggcaccatgttctgagactgcacgaagcagcaaggccctgggcccagctcaggaaaccgttttttcctccagggtctctgggcctatgatgggagagtctgtcgccaagatctctgacataccctggagcaattttgcccattgtcttgacaattaacatttagttcctggttacttatgcaaatttctgcagccagcttgaatttcccctcagaaaatgggtttttcttttctatcacttgttgggctacagatttttttgaacttttatgctctgtttcccttttaaacataagctccaatgccaaaccatctcttggtgaatgcataaaactgaatgcttttaagagcacccaaatcacctcttgaacgcttttctgttcagaaatttcttctgccaggtaccctaaatcatctctctcaagttcaaatttccacacatctccaaaaccggggcaaaaataccagttcctttgctaaggtgtagaaagagtcccttttatttcagttcccaacacattcctcatctccacctgagaccaccttagcctggacttcattgtccatattactgtcagcattttggtcaaagccatacaacaagtctctaggaagttccaaactttcccatgtctgcctgttttctcctgagccccccaaactgttccaacctctgcctgttgtctagttccaaagttgcttccatatttttgggtatctttttagcatcaccccaccctctgcagtaccaatttactgtattagtccattttcatacttctataaagaactgcttgagactaggttatttgtaaagagatttcattgactcacagttcagtatgggtgaggaggcctcagaaaacttacaatcatggcagaaggcaaagatgaagcaagtaaccttctaaccaaggcaacaggaaggagaaatgccaagcaaagggggtaaaagccctttataaaaccatcagatctcatgagaactcagtcattatcctgagaacagcatggggagaactgcccccatgattcagttacctccaccttgtctctcctttgacaggtggggattatgggggttatagggattataattcaagatgagatttgggtggggacacaaagcctgaccatatcacccttctttcctgtctttctgttaaacacacaaaatctaaaaatacatctgcaaaaacatttcaattaggacatgatattgtgccattataaatgcaaattcaagtatggctacttttgcatatctctactgctactgtcaaagtccagtctaataaggtcttgtccttttattcacggaataatgttttaactgttcagcttggtcacattgttggtctccacagtcaattcttaacacttatcattattttatctagagtaaagccaaagtctttttgataaattgtaaggatctattttacttagttttaattgtcttcccaacgtaattactaattacactctaacttgctcatccttatccagttacacttgtcttcttgatttctttctaactttctaggcatgacactgttcgatgatctttgcactgattcttccctttgtttacattccttgctctccaggtttatacggctaattatttgaactttctcaattatttgctgatatgttatcttgtcaataatccctaccatgattggagtatttaaaactaatacctttttaacctccatatttcatatttttacttgctatgaattattttcctcaggaatcaaatacactattcaaatacatataatgtgattatatattatgtttatgcattattctgtttctatcacaagttttatttagctttattagggcaatactttttggctatttcattcactgaaatatatctcaagttcctaaaatagttctgagcgtaaagtggctgcttagtgtatattttcttaaaaactacatgaatattcattacttgtggtaatgatgggagagtaaaatggtcatgtaaaattttcttgggataaaaattataacatgtagataaaaatgcatgaatatttcaaaaaggattcaaaagaaggagtaagtatacaaaacaagctgaagtcagaggagagtccttcaacagtaagggataagaatattagcattttgtttcctgaagagatcctccaatgtactttgctacagcagagaaaaaatgttttcaatatgaaaaatcacactgatgcattgcaggcttaccagcccaatatggtagaaaagaagttcaagattaaataatttaagatgggatactttggaagtgaaagaatcacagaaagtgtgtgatctataatttcagcacaaacttatatttctgaatggtcactaagataaactatacatatgcattagagatatccatttaaaagaacatagagtacaaaagtatgtattctcataaaataaagctcttccaggtgagttccatgtacttgttttcttattaattgaattaattgatggcattcctcaaccatattcaacttggacagcaaaaagctgaagcttaatgacttggagattcaaaggaaagaaaacaaatctatggagcagctgtaaattagtagaaatccccagaaacaaggaaatgccaggaagattttgcctctaattttgagtacagtcatttctctgtatctgtgggagttgtttccaggacccctgtggataccaaaacccatggatgcttaagtccctaatataaaatggtgcaatatttacatataacctctacacattctcttgcagactttaactaatctgtagttctcttataatacctaataagatataaatgctgtgtaaatagctgatctgctgtattgtttagggaataaggacaaaaaaagtcagtatatattcaatacaaatgcatttttttgatgtttttgatatgtggttggttgaatccatgatgcaaaaccccacagataaggagggtcaactggtaatctctgtctcttttatgttgagagacaaattaagcagagaccgtggatactgggggacaattctccaggtggccttgaactaacccagtttcccccccatttttacttgtagctctcatgaataactataaaatacgttgggaatgtaatatcctaaaataaggagggactggctggaaagcctggactctgtttcaacctgtccaccctccctctcctgaaaacaggatgtccttccccactttatccgaaaaattctgacaacccaggggtataaaaccgagctcagcctgtttaccaggcttcctcagctgcagtgcaggtggcagacatgcaaataagattccatccattcctggcagcttttctgagccttggcggactggttcacatgaattctagacttgtgttttttcttcccacctattttcatgtaataaaaacgtttcatattacttatggatgcatgggtgttctgtcttactggactcagacaagtcggtgaccagtccaagtgaacccgtttctcagagatctctaagagtccagcctaaaaacagcatcttgaaggcacaaaaattgagcagacactttagctgatgcctaatgcttggaaaataaagctagcatttcaagtccaaacaaggttactatttagcagacaaaaataagatagtaattctaagaatccctatatcctacagtgtgttatttataatttttcatgaatgtaaagaaacaggaaagtgataacttacaataaagaaaaagatactgaataaaaaattcaaggtaatgtcaaattttggatttagcaagaaggacttcacagaagcttattaagcaatattcaaagaatgagtggatatgtccaaagtttaaagaaaaatggcagtaatgagtgaacggagaacggaattctgataggacaaggaaaggacaaaagatggaattttagagctaaaatgtccaataaattaaaagaaagactcaatgaaggactgaagatgacagaaaaaataaccagttaccatgaaaacagatcaatctaagtaacagaaagacaaacagtacataaatatactgacataccttgccaagaagttcatgtctatagttgtagtgccagaaagagaaacagaaagagaaacaaaatatttgaagaaataataactgaaaacttgtcaaattttgtggaaaatattgacttagagatccaaggagcttcaaactaaacacaacaaaaatgttaaccacattatagacaaaatgctaaaagtcaaagaaaaagaaaatcttaaaatgaaccagtgagaaaggaaacatcacatacagggaagaatgttatgattaattgcccactgttcatcagaaacaaagaagttcagaaacattgaagtgtcttataaaaataattaattttataaccattttattgtaagatatgttccactgtagaaccatctggatacaatattctcttaaagtaatggcaaaacaactgtgtattcttctatgaaaacatgattttcccccttactcaagtcttataaaagtaatttctagaagtattaaaaattaaatgtgatagcaaggaaatacggtttttaaatggtaatatatataagaatatcttcatgatatatttagagaaatatttttaaataaacacatataacttaaaagttataaattgactacattgaaattaagaatttgtcttcattaaaagacactggaaaatgaacaaaaatacaaatcatcaagtgggagaaaatatattcaatacatataaccaccaaggtctagtgctaaaaagacacaaaagaaataaagtcaataagaaaaagacaacaaataacccaattgaaaaaaatgaccaacgaatggtttagaattcataattcataaatattaactccaaatggctaataaacataaaaaagtcttaactattactgattgagaaattacaaattaaaactacaatgctacccgaccctgtacttatcgtattggctaaaactaaatagatgtagacctcattaaggtctcccatactctgctggttggagagtgtggtacaacctcattagaaaaaaatttaaatatttatctaaatcttaagatagacacatcctatgacacagcacacctaaatatttatcttagaaaactccattggataaatatacaaaaatattcattacaaatttttgactaattttctcaggtggaaacaactaaaatttcattgtgtttattaaatgatggataattaattgctataatttttaatgtaatattacacagcaacaatgataatgagtgacaacagtaagatttgagatgaatacatttttaaagaaaacatgaatattgagcaaaataccaagattatttagtttgattcatttatataaattaataaaagagatatattaattttctgttgccgctgtagtaaattactataaatttagtggttaaaaaaactcacaaagttattttttttttgttctgtaggttagactttaacactggtttcactgggctaaaattaagatattggtaaggcagtgttataatctggtggtcctaggaataaaatctcttttcttgactgtttcagctataagatactgcagacattccttgactgttgtttctttttttccattttcaaggcaaaactttgcttctctctgtgtcatatttctatattcacatccctctaatttaaagaaccatgtgattaaacttggtacagctagataatccaggataatctttccattttcaggtctttagctaaatgacatttgaaaagacttcttgccatataagatcacatattttcagattccagggattaggacatgggcatctttgggagaccattattttgcctaccacaagaggcaagagcaaattatattgtccagggaaaaaatatagttacaaaaacaataaagatatagagaaaatagctatcacaaaattctagtaggaaaaatttgcatagaaaatggtatcccttaggtcacagagagcagtgcagtatttcttgatttaggaggttatctcattgccctttttttaacagaatagtaaatttcacatttacagtttgtatactttcatactaaaactaattaataatagattatatgggatttcaaattgagtgaagaatcactcttttggaatcactactgcgttttgactagacggtgatgggttgaactgtttttggcagtgtataaagaaggaaagactgaatagattagtgggatatttcagaacagtataagcaaaagattttttaagcttgtaaactttgtaattttgttatttttctccctttctttttggcagattttacacatctctctagtgattcatataatgattgattatataattgttttgagaatcttgaaatgacatcacttaacccatgtttgagagcacaatattgattaagagtcattatgtctgaatttgttaattttttttcacatacactttctattaggtgcaacttctgtttgttatcttaagtatgatagatgatgattctcactatacttcctttttataaataacaccttcttaaatatttgactatgatagctaaataatgcaaaaatcttggatgccaaataaaatgtgatgcagtttaaaaatcccaaaacaacacacattattgacagtaaattttaaatattataaattttaaattttagtataaaataaattttaaatactttaagctatttacatattttaaaagttattattttgttctatcaatatattctttctgcattttgttaattcaatttagttaatcttacctaaccaatttctttctgtagttcaaaactttataagcccaaagtgttaaaatttctggcatctttttaatatacaccattccatcatacaaaaaaggagaaatactattttagattaagagacagatgcaaaatagtagataaaataatactgatttcagatggaagataactgatgatcctaatattaaccaagttttttatttatttatttttttgaaacagagtctccctctcttgcccctgctggagtgcagtggtgctatctccgcctggggttcaagtgattctcctgcttcagcctctcgaatagctgggactacaggtccccaacaccacgcccagctattttttttggtatttttagtaaaggcagggtttcaccatttttgccaggctggctttgaactcctgacttcaagtgatccacccgccttggcctcccaaagtggtggaattacaagcgtgagcctgtagccaagttttatatacactggcaaatatgttatttaaactttctcttccataatgcctaaacagaaaaatcttacaatttattattatgtgccaagatttgttgtgaaatcaggtgaagaaaaaagtccaatggagcaaattgattatctaaaaggatcaaataacccaatcaattcatgacttctagttattagtggattgtaaatgagaaaaaaaaaattttttttttttgagacggagtctcgctctgtcgtccaagctacagtgcagtggcgtgatctcggctcactgccagctccgcctcccgggttcacgccattctcctgcctcagcctccggagtagctgggactacaggcacccgccaccacgcctggctaatttcttgtatttttagtagagacgggttttcaccgtgttagccaggataattcaatctactgacctcgtgatccgcccgcctcggccgcccaaagtgctgggattacaggcgtgagccaccgcgcccggcctaaactatggatttttttttcccagtggagtttcgctcttgcccaggctggaataggatggcacgaactcggcttactgcaatctccacctcccgggttcaagcgattctcctgcctcagcctcccgagtagctgggattacaggcatgtgctaccatgcctggctagtaaatgagaaaaattttaaagaaaaatacatggacatatctttccttcaaaaaataaatgtgatatttatacttatttaatagtaaattattctcaaaatttatacaatagttcacttgataataatacattatgtgacaaaatcagcttggatttattaaatccatgttaatatgaatctaaaatgagctttgcattttctttataaactataaatattttgggtaatttttatggcttttattgtttagtaggctcaagaagaaccacactagcaatgatgtttcactataagcaagcctttttcactgttatagatcaagtgtctcaactagtatcttgaaaatgtttgctcaaggaaaggaaaatttcttgccttggactttactatctggtcaccatgatcaaatcctgaggcaatgattttcaagaagtcatactcttcatgacattgattaattccatgagaaatctatttagcgatatacagataagatttagaagatgttcatggccttaaattgaattttagattagctatatatcatgttaatatgcaggtaatagcagtttaaagacgatgtgatgccttaattatatatttgtctagaacaacaggcagctttgcagaaggttagagtctattaataatatgcataacaaccggtcacttgacatttaattttgaatctgacaactttgggccagttgtttcaggattctcacacaacctagtgtgctgaagaatgaatgcgaggtatttcagtgatggcaatacatttaaaactatacttaaaaaacacttttcagtgacaagtggagttttaaaaatatacaattttattatgagggagtgacacattttttgagaaggctagtttttaaactggaaggactgagcctatttattaaacaagcctagaaatatctgcaggaaatacgaatagaaactggtaagtgctttgtagagtataccttaaagttatattgctgcttactttaagtatttttgtttcaagtaacaaacatggaatgaggttaacttaagtaaaaaaaaaaaaattgcttgaaataataaactgtggttttccaaatcgagggaatattatacaaagaaaagaacctagaaaaggtagtggggagtttgtaggtctactgaacatcattttcttaattcttatgcaagaaagaataagctggaatttttgttctgtctccttagaagtgggtttcccaggaaataaacctaattaatgaactttaattatacatcacatattcaataggagaatggaagaaaatttgattgacaaaacccattgattgtgggaggggtggatatttgaaaaaaatggaaaaccaatgctgaattgcaaaagttttgttaatgtataattcattttgaaatctcaacttcatttacatttttagtagcactacaaaaattaatcaattcattatcttcattttgttttgagggaagatgaaaaacaactgccatcctcatagtcttcaatttacaaaaaatcatcttgttcttccaaattttcgataagttcttgaaatttcaaatattttccccatagtaacctttgtatctgatcaagaacagtgatatattatatattgacaataatatttttatccatttatttagtatatatatcaggggtatatttctatgggaaaggaatagacaaatactgacttttatgtgtcagaaatgctattgtatttaataattaaaaacatgctttgagacatgcattaaaattattgatttattgataagacaaaaaattcaaagagattagtttctttaattactcacaataagaaggaagaatgtgaatgaaatataaaattctttcctatacactcctctattttattgttagattatttagaaagtaaaaacaagaatatcatgctgtcttcaaagaaattatattttggtcagtggtataaatcatgtaaattaaaatgtattaagtgcagaaatatgtacaaaactgtagatacacttccattttatttatttattaggagacagagtcttgctctgtagcccagactggagtgcagtggtgcgatctcagctcactgcaacctcccaatcctgggttcaagtgattctcctgcctcagcctcctgagtatttggaattgcaagtgtgagccaccatgcctgaataatttttgtatttttggtagggaaggggtttcacctcgttagccgggctggtctcaaactcttagcctcaagtgatctgcctgccttaggcttccaaagtgctgcagttacaggcatgagccactgtacctggcctatagatacactttcagagaaaaaaagagattattttggtatgagatgatgaatcaaaggattctttgtaaaaagtttagaatttgataacagcagacacatatcagatgaaaaaatattttatgtgcaagggatattgtgagttaaatcagtggggtgggaagaatttaacgtgtggcttttaacgtaagaataataaacaatttgtaagtattttatataatccagcatactctgtatgaaatggagaaaactttttctatcaaaatgctgtaagaggaaaaatattagagcaactattttcactaatatgcttaatcacataatattaaaaattttggaagaaagtttccatcctacatttccattaaaactaaaataataaatttcaatgaaaataattcctacttgagttttgcaaaggagaaacttgagtcttattactataattttcatcattttaatatacaattttaatggttttttaaataaactttcttcaccagatactaaatattttatcttacttttttctcatttataaaattcctttggggctgaggaaaaagtgcttttcaaactttacagtattttataaacaacaaaggtagcattttatctgctaccattttacacttcactgctgcacagaagtgaggaggcgaagtcatttggggatctgggcattcactttcttacaagaaggttactttccaatattggacaagtatagagttttccaaagaggcatatttcattcaggttgcacaatcagtgtcaaggtcccagaaggtcattatccttttcaagtcagttggaatgacatctgcctcaagcaacctagaggcacagctgattgttctatagtaagaatataaacacttcctgtaacttatgtcagtataagtctggtggtagaagagatgcatttgggaagaagaagaaatagaaagcaagtttatttactttaaatatacttataatattttaagtttattatttaaaatattacaaatggaaatatatacacatggctattaaaataagtgtggttttaaatttcaaagcctcattgaagagttggatgacagcaaagggaaaacacttaagtccatgttcattgctaggtttctagattttatttcttacaatactgcttatctttgcataaaaaatgaacaaatcaaaaccatatatatacatacatattatgtatatatatatgtgtgtgtgtgtatatatatatatatatatccccagtagagaactcataattcaacctgatacttgttattcttatttttgttgttgctgttataagctctggtccaagcctggacaaaacttttactcccaattcccattagcatgaccatatgctatatttctttcctgctcaacaggaaataatacgcaatgtggtgcttttgcttagaggagctgtggaagatgcaactaaaacaaagaagagagtgtagattcttacaataatccaaattttggctcacattattttccaagctttccttaatgatttaaaagaagatctcattaatcctcttgcaactggaaaatatataatctattccacctcaaaagatcacaagttgaaagggaaccagatcacagaatcaaagctcagccgatagttactccatactataaaatatacaattttattaaaattggagcagattcctgaggcagatattatgattacagtttagtctgttgctgtatgtaaaataagacgtaagaccaagttcggggctttgctacctactgataattgcagagtggctggtgggtacagaacatgagaaagttgtgtggtttttaactatcctatcaccttccttaaaaataatcacttcaagctgggcacggtggctcacgcctgtaatcccagcattttgggaggccgaggtgggtgaatcacttgaggtcaggagttcaagaccagcctgaccaacatggagaaaccccgtctctactaaaaatacaaaaaaaattagccaggcctggtggtgcatgcctgtaatcccagctactctgcaggctgagacaggagaattgcttgaacctgggaggcagaggttgcggtgagccaagatcatgccattgcactccagcctgggcaacaagagcgaaactccatctcaaataaataaataaataatcacttcattcaactcagatgcattaatagatttgctttatattttttaatgacttgcttagaaacattattttcttacataagcccagtaaaagagaataaagctttgatattgatgataaatttagagcatgtacaattgttatttactctcttggtgaatcacaatttccatgatactacaattgacaagttaatttcactattttaatgatcttcatagttcacaaacacacacacacacacacacacttttctttattctttaattacaaagacaagatacttttgctgatcacatttgatacggtttcactgtgtccccacccaaatctcatcttgaaatcccatgtgttgtgggagggacctggtgggaggtaattgaatcatgggggcaagtcttgcctgtgctgtacttatgatagtgaataagtctcatgagatctgatgcttttaaaaagaggagttcccctgcacaagctttctctctttttgcctgctgccatccaggtatgatgtgacttgctcctccttgccttccaccatgattgtgaggcttcaacagcaacgtggaactgtaagtcgagttaaatctctttcttttgtaaattgcccagtcctgggcatgcctctatcagcagcgtgactaataacagtaaattggtcccaagagtgcagcgctgcagaaaagatacccaaaaatgtggaagtgactttgaaactgggtaacaggcaggggttggaacagtttggaaggctcagaagaagatcggaaaatgtggaaagtttggaacctcctagaggcttgctgaatggccttgcccaaaatgctgatagtgatatggacaataaagtccaggccaaggtggtctcagatgaaaatggggaatctgttgggaactggagcaaaggtgacccttgtcatgttttagcaaagagactgttggcattttacccctgccctagagatctgtggaactttgaacttgagagagatgatttatggtatctggtggaagaaatgtctaagcagcaaagcattcaagatgtgacttggatgctgctaaaggcattcagttttataaaggaagcagagcataaaagttcagaaaatttgcagcctgacaatgtgatagaaaataaaatcccactttctgaagagaaactcaagccggctgcataaatttgcataagtgacaaggagctgaatgttaatccccaaaacaatggggaaaatgtctccagggtatgtcagaggtttttacagcagtccctcccatcacagacccaagacctaggagaaaaagtggtcttgttggatgtgcccagagtcccggtgctatgtgcagcctagggacttggtgccctgggtcccagctgctccagccatggctaaaaggggccaatgtagagctcaggccatagcttcagagggtgcaagcccaaagccttggtggcttccatgtggtgtcgagcctgtgagtgcacagaagtcaagaattgaggtttgggatcttccacctggattccagaggatgtttgaaaatgtctggatgcagtggcatccaggcagaagtttgctgcagtggcaaggctctcgtggagaacctctgctagggcagtgtggaagggaaatgtgaggtcagagcccccacacagagtccctactggggcactacttagtggagctgtgagaagagggccaccgtcctccagaccccagaatggtagatccacagagagcttgcaccatgcacagagaaaagctgcagatactcaatgctagcctgtaaaagcagctgggaggcaggctgtaccctgcaaagccacaggggtggagctgtccaagaccatgggaacccacctcttgcatcagcatgacctggatgtgaggcaaggagtcaaaggacatgattttggaaatttaagatttgactgcccttctgcattctggactggcatggggcctgtagcccgtttgttttggctaatttctcccatttgtaatggctatatttacccaatgcctctaccccaactgtatctagaaagtaactaacctgcttttgattttacaggctcataggcggaagggacttgccttgtctcggattacacattggactgtggacttttgagttaacgctgagaagagttaagactttgagggactgttgtgaaggcatgattggttttgaaatgtaagtacatgtgatttgggaggggttggggcagagtgatatggtttggctgtgaccccacccaaatctcatcctgaattgccatgtgttgtgggagggacccggtgggaggtaaatgaatcacgggggcaggactttcctgtgctgttcttgtcatagtgaataattttcacaagatctgatggttttaaaaagaggagttcccctgcacaagctctctccctctttgtccgttgccataaagtacattatatttagaagacaaagaataaatagagaaactatttaggaatatcatgctaaaaagagtgttatgaatttgtcttctgagtttctatgaacatcagtagcaattcatcaaccaatatttaagggccaaatatgaatcaaaatctactggatatttatattcccattacattgattgaagcaatgagtattatttggttgtaatcaaggatataattgtgcaaggtcatgcagactgagagagtaccttatcctgaaagcattatttttaactctcaggaaattatatagttaattagagaaacttgaatatttaacaaaattaggagaaggaaagttttcttgggagggaaagtaaagtgaatatgcaagataagcaggaatcttgtagactatcttgtggcagataccaccattatttctattttagagataaagaaataaaaacataaagtaatatatctaaagatgtgaagctaatcagtaccaaatactagcaagaatgattaaaaagaccctatcaatatcagaaatgtaaaatatcaatttatgtctaaaagcatatctttgtttatgtctaatacatatccaaggcataagaaatagagaaaactaaatacagcaaaatattgtaataaaataatctttatataaaaaatgatacacttacaattcagttggaaatatataaaaaaattcaagctatggaaaactttccattgtggatttatttcaatttttagatatgtatcaagaaataatttataactttagagtcttacttaactgaagcatgatattttaaatttaaaggtaaaatagaaattatgtgaatccagagttaagtagtattatgttaattgcacaatcttactagaattaggaaatgaatgttaatttgaactatggcatatagtcaagcttttaattcgtatttctttcacaattctcattaagaattagagctgatctggctttttacaaatcatcaacattgccaagatggtttggaatagtgcagtgtttcagagcagagaggttcataaggttttattaggtcccatgggagaacatcaacttgttctattctcccccaagaaacaaacaaattcactcagtgaaaaatcctctgtgagtggatctttgcacactgataaggagatggtacaatagttggcattatagaactttgatgatgtggaagaaacacatggaagtcatactttctgggtaaatcaacaaggttagttagacacaaataaacatatttttctctacgagactaattttgtagaatttaaattccacttgtaattatagagaaaaaagtggcaaaatatatactgtctgcatttattcttgaccaagaaaatcctgaaaagtataatactaaaaaatcgaaaaggaaatgctcacgtgatgtaaatattaggaagtttccaactcgggaattgaggtattacagaaagactaggaagcagctacctacatcaaagcagggtgaattaaacagaagaaatgaggtaccattaattaggttaatgaggaaccttcagtggactggttcttatacttctgaggggaaatggtatagatggagttggaaaagccatgggaagctcagaggtttcagctgtagatttgttcttttagtcaagcaagccgaaagaaagtatttaccaacctttggtgaatgccttgaaagctactgtttcgcatatgttgttcaatgttttagttttggcagaacggtcactatggtttgggctggcattggaagtttagagcaatttgtcttaaaatattttcatttgcaaaattcaacaacactgaaagatgctacaaaatgtagcttgaccccagatgcttatcaaaaatgcttattgaatagcattggagcttatataaattattaatttcaattattaagtattaagatctagtaagagtttaatacaaggtgattacatctttccaaatcaaactaagaacttcttaatcatctttgggtaacatttttggataattttttgtaacattttccaataatggctaatagcatgtctgcttcattttcatagtcagatacctgtgattcatgtgaagaattctcatacatttagtcagagttttatcttattttatttgaaaataaataaacatttttttgccctggaattatgtttaatcttggctccaggagttatgtaataaaccattggtataattgaagacttcaacactggtcttcctattccatatatcttagagttactagttccttctcacttttgaagatttttttttttgacggagtcttatgctgttgccaggctggagttcggtggcatgatctttggttactgcaacctccgactccctggttcaagtgattctcctacctcagcctcccgagtagctaggattacacgcacctaccactacacccggctaattttttttgtgtgtgtgtttttagtagagacggggtttcaccatgttggccagaatggtcttgatctcctgacctcgtgatccaccagccttggcctcccaaagtgctgggattacaggcattagccaccacacctggccacttttgatggatttttaaaatttctatatgactttatgtcatctaaattttaactcaaatgcactcgtgttaatttgttaacattttattttttatttttgcggctacataataggtatttatatctgtggcatatgtgagacattttgatataagtatacaatgcgtcaaaatcacatcaggacaaatggaatatccatcacctcaagcattcatccttttttgtgttacaagcagtctgaccatactcttttagttatttaaaaatgtacaatgaattattgttgactgtattcaccgtgttgtgctatcaaattaccacaatcagaataacttctcaacctgtctccatattttacactgatgttgaaaagtcagttccacagaaagcaatatttcaattcaaataataaattacagtcttgttaaatgttatttaaaatattacagtgaagaatatgaagagattacataaaattttccccaggtttaaaataatactcaaatgcctaaatatatcagagctatttctaatgatgtatttcagtttgtatatctttactcacaaatattatttgaaaaataagacaatcttctatttctttatacatatttacatatgtaagccattacctattagctggcaatttttaaaaaaacataataggaatatataccttttaactttatcattcattgatactattgactacaagaataaaaatatataagtaaaaatatagattttatataaccagcgccaaattatatgtgcatttatcaaacttttggaggcttttacatgagaaggctattacaatcactcaaaaaattttagaatataaaaactctctaatttcaaggaatgtaaatcttttaagaggcaggcaagtgaaaagttgaatcaaattagaggaaggtctatatcaaagtaatggataattattgaattttgagaatttcttattaaaaatattacttgaaactgtctctgtctatggcttaattttttgtcttatggtttttgaaaagcatattttatttttttaaatttaaacaatataattaagtacaaattataaaacccttccattggctaaagttatcaatttacttttcattattatgggtacataatagtgtctatattaatggggtacatgtgatgttttgatagtgacatacaatgtgtaattatcaaaacagggtaactgggatattaatcacctcaattatttattatttctttgtgttaggaacattccaagtctactttttcagttattttaaaatatacagcaaacgactattatctacagtcactctattgtgctactgaatacttgatcttattcattctaattgtatttttttgtgcccattaaccatttcccctctatccccttgttctgctacccttctcagccactgaaaaccatctttctactttctatctccatgagtttattttttcagcttccatatatgagtgaagagatataatatttgtctttctgagcctaatttacttcacttaacataatgtttttcagttccattcacgttgttgcaaatgacaggatctcattcatttctatggctgaatagtgctccattatgtatatatactacactcctttgtccattcatctattgatggaaaattaagtcaatttcataccttggctattgtgaatattgctgcaataaacaattgctgcaatattattgctgcaataaacatgaaagtatagatatttctttgatacactgatttactttctttagggtgtacacccattaatggtattgcaggatgatatggtagttctatttttagttttttttaaaaaacctccaagctgttcatagtggtaatactactttacattccgaccaatggtgtatgagattattctattctccaaatccttaccagcattctttattgcctatcttttgcataaaagtcattttaactgggatgagatgatacaacttaaaatgaccatgagaaaaccgtacatattattggaactaaaatcaacaaaattgatcgtagcccgtgttgctgtggatggagaacaaataaaactctcacacatttgggtaaaaaatcaaactttataaccaccttggaaaatagtttggcagcatcttcatacattgaacataatacctgccagctatttcatccttagatattaacccaaaataaatgataatatatgtccatacaaaaacttgtacactgatcttcataactaattttttcctagtagcccaatactggaaataacccaagtgtctatgaataggggaatggtgaaaaaaatgaacatatccatacaatggaagagtattcgtcaataagagaaaaactcttcatacatgcaacaatattgataaatctcaagaattatactaagtaaaaggagtcaagctattacctgcctccaaaaaagacaatattaaatggtttcatgtatgtaacattatagagagcacaaactattccatactgacaaaagtcagggcagtgcttccttggggatgaaaactaggcagcattaggagagtgagactgaaaggaacatgagaaaacatttgaaggtaatggatttgttcactgtgttaatacaatgcatttttacgtataagacctaccaacttccacaatttaaatatgcacagttaattgtaaaaaaagtatgagtaaatagaaaagaagccacaaagtcacttgacactgaataaatttttcaaaaaagttatcgtagaaaagggaaagtcttatatatgctgtaaaagttaaaggacatgccactagactagatgcataacgtgggaaggaggggagagcattctaggcaaaggaagcaaaggaagaataaagcattaatgccaaggagtgttgagaaggaagtgataacactgggatgaaaaactacaacagggtgaagaacagctgtgaacataacattggtagatagatttatcctctaagggatggcaatacggtaaaagatttccaaaaagttcacataaaaaaatgagtgtcagcgttagtgaaacaaaagtcctggcagagagtaagactggagggagaaaacattaagacaaacaagaatatgcaactttaaataagataaatataaatattttattgttataacaccttataccctattgaccttgtgaactttaaaaacatatgtaaaatataaatcaagaatattctgtatggtgagattatagaatcaaatagcaattcaaagaccccaaattccaaaatgtattctaagtagtataatttttttgttagtaagtgtaaaatctatttcaatcatatctaatcagcttgctcattagaaatagcgtatagtgttttcagctagtaaataagtctgtcacgtttcattattattattattaaagtattattagtatctatttctttccctcaaagtcataacagcctattcactagataaaatcagctaatttttccaacattacacttaaaacaagtctttttttctgaattgcttgatggtgacttttgaaaagaactttcatgaggtagacaaaaataaactgcaaaatacacatttataaaacagaattaaaacaatgatacatgaatctggaattagagaaaataatcagcatataaatagaatctgagaagaagtattacccttgaaaataatggctgtatcatttgtaatatatgtaatactcataacattcatcttgtgggttttttttttgcttttaaacaaacagttttggattttgttgtttcattttattataagtgacacatgtttgtacatatttatgagttaaagtatcatgtttcagtaatggatacattgtataatgattaaatcagtgtgattagcttatccttaacattaaacatttaccaattctttgtgatgatagcattcaagatcatttcttctagttatcctgaaacatacaaagcattattgtcagctattttcacctaccgtgtgataaaacactagaagttattcttcctgtctaactgtaactttgtacctaatattcagataggcaagtaactttgtcatatatgtaacctggtctaaatgaacagtaaacagtgatcggtcttggtttattatgttgactaatagagagatcagtggtcataataatcttttttcaaatgtgtttccatttgtaagaaaattttatttataatttgaaagtgctcagctctgcttttctatatcgttttgataccattgtccacagttgtatgcttttgatgcaaatatttcagattatttagaagtcttaggaaggttaaaattactacatattaatacattatctggcatgtttattataaccaaataaaaaagtttattcctcttttaatagaattttaaacacatgtgagttgttcttgtattcttttatgaaaaatgctcatttcaagagaacacattttaagtcatatttttatcaaatatattaattaaaattataatgtcatttcaaactttattcaaacttaattctcaacctctagcctgcttgtcatgatagtctgaaataataatgacataaaatactctgatgggacaaataaattactctcacctttcttggggaatgagaaagacaaaacagaaaaatcagtaaaagatataaaagcagttttctggagtttattggttatagttacttgtcacaagtatctgtgttcatctgagtctgtaattacgtagctgactctctgaaaagggaacacagtgatgaaaagacaaaacttgaaattacacaattaattgcaaactatttctcctaaggctatatatcacgcctaagagagcctgagcttaaaggttatactactaattctcttttcaaatggtacttttattagccattaaatatcactcagtgtgtgattatttttacccttgtcttagaaattgtgaacctgagacactaaaatgggttaatggctctaaatcagacaatatataaaaatctcaactaatttgtttttgtaaactgtttggatcaagttacatgcaaaaaaaaatgagtacaaagcttcagggaaaaacacattaaataaatgtgtgctttacaataggaaaattataaaatatcagcttttgtactcatcttcttttcaacatctgtatcttgagaatgagtgggctacttctgtagtgaggaaaactcccagtagttaatccgttgctagtcatatatatacatatatatgccatcatatgccatcagacacctgaaattttagatatattattgtaatttatagaacatatttatgttagccaatattaaaaaacgaggatatccattggcttgttaaagaataacatccgaacagtactgcaatgaaagttgcccgctagtaggggtgtgtttttctcacttttataaattcagagtttgaatataatatgggccaatacattgatactgcatataaaataattaaaaatggaacatatcatcaggcagtatacaaatctttcgggatacatagtgttgggtgggggcagaagctacataagaacttaggaagtacagtgggtcagggagagatggtacaaaaagagttatcacaaaatttgcatttcatatttggatccaaacacacacacacacatacacacacacacactcttatacaactggatttggtactttttgatactttttatagacttttttaggaatgtgcccttaacccacgcacacaaaagacctcgctcaagttaactcaacttgtcattacaagcagaagaaagcaaagcattgtggtagttcatcttggaaatatctgtaaggtttttatctgatcagttggcttttttttatgtttttaaaacaaaatagaatttggaaaatgcaagctgtatattatatttgtaatgaattttatacttcaaaaatgaaagtgagtgacttcccagtagtaaatatttaaatacttcaacaattctaatacttaaatagtggattgtaaatttattactgaactaaataaattcttcaaaggtattttatttagtctgtaaaacatttgtcagttacctagctttataatttaaggagtttttcttcatctataataaaaagtttagtctctgaaactattatcataattgtatagttatatgtgtttgattttctagaggagcatatactcaccaaaaagtgttttatatcatcaagaagagtaaaggaataataaaattattaccatattgtagagttgctacaaataatatgctatgctgctgtttcaacaaaactgtctacagtttttttaggcaagtaactcatttcttatatatcagattaatgattatgaaaactgtaaatatgtaaagcaggtatgaagcaataaatttttttctacttagtaaactctggaaacatctttatatcaggaaatgtctttactcttagtgatgtttagaatagccaccctttttagtaatgcaaaagggatgaaaatgccttttacctcatgacttatttcatttaggtcaccatttttatacctgtttgatataagttatttaattttttattttaactttataatattgcatggtctcacttacatgtgaaagctaagaaggttaaaatcttgaataaagaatagaatagtggtttccagaggctggaagggttgtggggaggagaagatgaggagacattggttaatgggtaaaaaataaagttagatagaatcaatacaacctagtgttctggcacaatagggtgactatagttaataatagtttattgtatatttcaaaataactaaaagaacgaaatgggaatttttctaataaaaataaattataaatgtgtgaggtgatatatatcccagtgactccaatttgatcacgataatgcattacattgtaagcttgatttttaaacatacatacattttgaagaatcaaataatctacaaaatttatctattacaaaaacaaaacacagtagccaaccctagctctgttttaatgacaaaaacagaaaaaccaaggagcaatgagagtataagcatgacatttagaaatatagggattataaacaaaagtacacagctatcccaaggtacggtgagtggccagctcctcccttcagctaaggcactctcaaaaggctggcagctcagggctgtttgcaggtggccctcccagcactgggagtaacacataatcctgtactgaaggaggatcttgacagtgtcacgtggcttccatccattccctactttggtgctggatcaccttttgttcagaattgcatattatttcctttcttggtatctcctttgttttgttatatgctctactgtagtttcctaaagtccataggagttaagatttctgagaccttgtacatctgaaatctacacttaactttcaaataattgttagcatgggacataatttaagtttggaaatcaaatttgcttcagaagttaaagtcattgcatcattctctctcagcttcagagatgctgttgagaaatccagtgtcaatttaactttttatcattactatattagcttttccgctttgaattcacctaggatattctctttttcccaagtaatcttaaatttcaggcttatttgccccagaatggatctattttcatccattttttgtctctcaatggggccttgcaacttagaaatttaaattatttgttcaatgattgtctactctctattatatctgtgttctttttaagtattacattattaaattaaatttacggtatattaactatatattcaataatatattaaaatatatattaatgttatcaatgcatatatattatgcattacattattatattctatataatatacatcaggggtattttattaatgtatattaaaattatggtatataacgtatctatatatacatatatatgtttatgttatacaatgtatatgtatacatatacatataggtataacatgtatatacatgtgtgcgtgtgtgcatgtatgtgtacatatatgtagttagcataaagtaaaatggagaccagaactggagaacccctgagtagacaaacccattaaggcctcattagtgatattatattaatcttgcttggtttgtaaacataatttaacttgagctatctctcttatatacccatattaaagaaaactaacatttaaggctaaccaatcaaaagccatcaattaattatagttattatgaatgttgcagcaggatagaccaaataaggctttattggtctatttttggattgataataatgttaatatatttgactttaatgactcaaaaattgtcattactttacttccatgttctctgtataaaagccttcccctggcattccttcagcacagccacttttggtttacagcagccttattcatgaatcactggttgctaaaattaagtatagtattattgtgcttttctttacactttaacagacaaattttatatatagttatatataagcatatatcaatatacatatatttatcatgtataatttgtctatattacatacatatatatggtctacaaaagttctggtctggtttgcaattttaagtttcacttttgttcttagagtgtcacaataatatctttcagtctttctactaaatttcaattctctgctcatatatttaatttaaaaaattcttttgttctctgagtatttatgaagtaccataatcttgtttcacagacatgatagcatttcttttatctctgaaatggtaatgaaagtttttgcttttttctgtttctattttatttttagttacctatcttcacagtctctgttttttccaagttgctttctttaagtttgtctgtttaatattagaacattcctttcgtatctgtgatcttgactcatgtttaagatggagtcattaaatcttatttgagaatttgtacacatgcatgctgtttgtggattgcacatgtggtgacctagcaagacaatattactggaaaatacccagagccaatgtatcaggtcatttttgagggaataatcaggtttctgaaaatataaatctttcactctttagctgcccctacttcctatttgtgtggtattcttcctctcaattgtggtagaactgtggccagaagcactgtggtccagatactttttctacctcgatgggtaataaatttcaattttctaagataatgaaagacagcctcttctgattgcctgaagtagaaaatccaactttcaagcaatcttccaattttcaccctttctcctaacctacctcatgttgccaattactgaaccctgcaaatgttccacagtgcacgtcactttgctgctcagctgtccatactgcctctttaggattttacttgttaaggccaattgacagttaccattatgctggtttttctttgcttaaaatacttttgctattatttccccttctaactctcagaagaaacagatgcaaatgtttgtgtttaaaacaatgtcttcaaactggaaattcatatttactaaaattacctgatttagctcttcaaaaatagagagcaatttatttatattattacatattttcagtaactctttaaactcctttataacatgtgtgcgattgaattccagttacctcagcatcatttattgaaaagggagtcctttccccattgcttgtttttgttagcctcgttgaagatcagatggttataggtgtgtggctttatttctgatttttctattctgttccattcgtttgtgtgtctatttttgtagcaacatcaagctattttggttaccgtggctttataatatgatgtaatgtcgagtaatgtgatgcttctggctttgttcttttggcttagcattgttttggttatttgggctcttttctagtgccttatgaattttaaaatcatttttttctaattccgtgtataatgacattggtagtttgataggaatagcaatgcaaattgctttaggcaccgtggccatttttatgatattgattcttccaatcaatgagcatggaatgttttttctatttatttgtgttacctctgatttctttcagcagcgtttcgtagttctccttgtagagatctttcacctccttggttagctgtattcctaggtatttcattttctttgagtccattgtaagtggaattgtgttcttgatttcactcttaactcttagcatagatgttgttggtgtatggaaatgctacttatttttacacatcgattttgtatcctgaaactttacttatattgattatcaattctaggagccttttggtagactctttagcattttgcaatagaatcatgtcattagcaaagagagtttgaattcttcttttcctatttggatatcttttatttcttgctcttgcctgattgctgtgtttagaatttctagtactatattgaataggagtggttagagtggacatccttgtcttattccagttctcaggaggagtgtttccagtttttgcccattctgtatggggttggctgtggatttgccatagatagctcttattattttgagatatgttcctttaatgcctagttttttgagggtatttaatattaagtgtttttgaattttatcaaaagtcctttttatgtcttttgagataatcatgtggtttttatttttatttctataataaatctcatttattaatttttatatattgcaacaacctagcattccaggaataaagctgctggattagctttttaatatgctactggttattttcgtctccctaggtgtgattttaggatgtcaatttcagatctctaactttttcacatgggtgttttccactataaccttccaaattaacatggcttagctgtgtcccaaagattttggtatgttgcatctttgttttcatttgtttcaaatattttttttcatttctgccttaatttaaattttccccaaagtcgttcaggagcaggttgtttaattagcatgtaattatatggttttgaaagagattcttggtataaatttctattttattgcgatgtggtttgggagtgtggttgatataatgggtttcttaaggacgtcttgcaaggctggtctggtggtaatgaattcccttggcatttgcaaatccgaaaaggattttatttccgcttcacttttgaagcttagtttggcaggatctgaaactcttggttggatttttttctttacaaatgctaaatatagattcccaatctcttctgggtggcagagtttctgctgaaaggtctgctgtagtctgatggggttccctttgtaagtgacctaacccttttctgtagctgctttaatatttttttcgttcacactgaccttgatgaatctgatgattatgcgttttggggatggttgtcttttccactgtctcacaggagttctctgaattgcctgaatttgaatgtcaacctctctagcaaggttggggaaatctctttgtagatcaaagaactatatggttaaaaaacacatatgggtgtggtggctcacgcctgtaatcccaggactttgggaggctgaagtgggtggatcacaaggtcaggagtttgagaccagcctggccagcatgctgaaaccccgtctctactaaaaatataaaaaattagccagtcatggtggcatgtgcctgtagtcccacctacttaggaggctgaggcaggagaattgcttgaatccagcaggtggaggttacagtgagctgagattgcaccactgaactctagactggacaacagagcgagactccatcttaaacaaacaaacaaacaaaaccaataaacaaacaaaagtctgtaaaagtagtagaagaaaatacaagtaaatatgtttataagcttgggtaaggaagaattttttttttttttgagacagcgtcttgctctgtctcctaggctgaagtccagtggcttgatcacagctcactgcagccttgaattccttggctcaagctatcatcccacctcagcctcctgcatagctaggactcaggcatgtgccatgctaagctaattttttatttatttttaaaattaattaattttttttttgagacggagtttcgctcttgttgcctagtctggagtgcaatggtgcaatctgggctcactgcaccctctgcctcccgggttcaagcgattcttctgcctcggtcttccgagtagctgagattacaggcatgtgccaccatgcccggctaattttgtatttttagtagagacagggtttctccgtgtcggtcaggctggtctcgaactctcgacctcaggtgatccacctgcctcagcttcccaaagtgctgggattacaggcgtgagccattgcactgctaagctaattttttttttttttttcctgaggcggagtctcgctgtgttgtctgggctggagtgcggtggcaggatctcagctcactgcaagctccgcttcctgggttcacgccattctcctgcctcagcttcccgagtagctgggactacagaagcctgccacaactcggctaatttttttgtatttttagtagagacaggctttcaccatgttggctaggatggtctcaatctcctgacttcgtgatccgcctgcctcggcctcccaaagtgctgggattacaggtataagcaactgcgcccggccctgctaagctaatttttaaaatgtttttgcaaatatgaggtctccctgtattgcccagtttggtctcaaactcctggcctcaagtggccttcctcatgtggcatcccaaagtgctgggattacaggtgtgagccaccacacctagtcccagaaagatattcttgaacaagaaataaatcacagccagatgcggtggctcacacctgtaatcccagcactttgggaggcctgaggctgatggatcacctgaggtcaggaatttaagaccagcctggccaacatggtgaaaacctgtctctactaaaatacaaaaattagcccggcatggtggccacgcctttaatcccagctactcaggaggctgaggcaggagaatggcttgaacccgggaggtggaggttgcaatgagccgagagcatgccattgcactccagcctgggcatcagagccagactccatctcaaaaaaaaaaaaaaagaaaagaaaaaaaacccagaaaacccaaatcagagagccattaagacaaaaaaaaaaaaaagactaataaatttgactccatcaaaaattaaaactcggccaggcgtggtggctcacgcctgtaatcccagcactttgagaggccgaggtgggtggatcatgagttcaggagttggagaacagcctggccaacatagtgaaaccctgtctctaccaaaaatacaaaaaaattagctgggcgtggtggcgggtgcctgtaatcccagctacttgggaggctgaggctggagaatcattggttgaactagggaggcagaggtttcagtgagccaagtcatgccattgcactccagcctgggcaacaagagcgaaactccatctcaaaaaaaaaatgcatatgtttcagctcagcaaccccacttctctattctcaaataatacacatatgtatgtttaaagaggtatgtacaagaatgttcactgtcaacactcttggtaatagcaaaaaaactggaaacaatcatcatttccatgaaaaaaagaatagctaaataaactatgcccacactatgctattctacataacagttaataatgaggatatgtatattgatatgaaaagatcaagatgtagttaaataaaaaaatgcaaccgggtgcagtggctcccacctataattccagcacttagggaggccaaggcaggaggctcacttgaggccaggagtttgagaccagcctgggcaacagagcatgaccccatctctacaaaaaatttttaaaaattagccaggtgtggtggtacatacctgtaggcggtggtaggattgcttgaagtaaggagttcaagattacagtgagctgtgatcacatatctctaaaaaaattttttttttaagatggagtctcgctctgtcgcccaggctgtagtgcaatggtgcaatcacagctcactgcagcctcaacttccctggctcaggtgatcctgccacctcagcctcctgagtaactgggactacaggtgagcaacaacacacccagctaatttatttatttatttatttatttatttatttatttatttatttaatttatttattttttgagaaggagtcttgctgtcacccaggctggattgcaatggcacacaatcttgacttactgcaaccaccacttcccaggttcaagcaattctcttgcctcagcctccttagtagctgggatgaaaagtgtatgccaccatgcctggctaatgtttgtatttttagtagagacggggtttcgccatgttggccaggctggtctcagactcctgacctcaggtgatccacctgccttggcctcccaaagtgccgggattacaggtgtgagctaccgcgcgtggcctgattttttgtatttttagtagagacagggttttgccatgttctcccaaagtactggaattacaggtgtgagccactgtgcttggcccctgtacaattttaaaatttaaaaaaaaattaaaaatacctggagttctggccttgaaaatcccatccttgtgggcgctccttccagtcttgaggagtgaacctggccatcagtgattctgaagaagcaatggccacagagaaccccagcacagcaaactgagaaactgccatttttgttgtattttattatttcctctagagatgggggggggggtctcaacatattgcccaggctggtcttgaactcctggactcaagcaatcctcctgcctcagcctcccatagtgctgtattacaggtgtgagcccccttgcctggcctggccatctatatttcttttgtttgtttgtttttcatttttgagacagagtcccactctgtcttccaggctggagtgcaatggtgtcatctcagcttactgcaacctctgcctcctgggctcaagccattctcctgcctcagcctcccaagtagctgggattacaggtgcccgacaccacgcccagctaatttttgtgtttttagtagagacggggtttcaccatattggccaggctggtcttgaactcctgacctcaggtgatccacccgtcctggcctcccagagtgctgggattacaggtgtaagccaccacactcggcctttttttcccaatgtttttttttttttttttttctcagagacctttgttctgagatctttatttcttctccctgttctttttccttgtctagtctacctcacaaatcatttcatgattaattttcctaaagcaaagggcaaatatttattaagcatttgccattatttgtactcagtatttggtaatggcaggaatgtttgaagaaagttaatatgatagtaatatggagcaatgtgaagttaagaagagagggagatggcaaccaatcaaaagactatatcaggccgggctttattcatcctgttcagaggtggtcacagcttcccaatgcctacaaaataaaggccaaattcctgagcctaatatccaagaccgtccattctatcctcaacatacctttctgatctcttcattacttcttcccattaaaagcctccaattcagccaattttttttttttttttgacatgggggtctcgctgtgtctcccagggtggaatgcatgacaccaccatagctcactgcagtctcaaaactcctgggctcatgtggtcctcagcttcctaagtagctgcaactacaggtgtgcaccaccacatgcagcttcagcctggctttcgcatgtgtgcgtacctctgttcacagttacttctcctgtctccttaaatcttgcttcctttatttattgattgattgaatgatttattgagacggagttttgctcttgttgcccaggctagagtgcagtggcgcaatctcagctcactgcaagctccgcctcctgggttcacgccattctcctgcctcagcctccccaggactacaggtgcctgccaccacacccagctaactttattgtatttttagtagagacggggtttcaccatcttggccatgctggtcttgaacccctgacctcgtgattcacccgcctcggcctcccaaagtgctgggattacaggcttgagcccctgtgcccgacaaggggtgcgtgttttttaaaacatgggagagggaattgtgcttcagaatcaccaccagctgttgcaacatcgggtgccactccatcccgcttctgaggcacgacggagcactttgggaggccgaggcgggtggattacctgaggtcaggagttcgagaccagcctgaccaaaatggtgaaacctggtctctactaaaaacacaaaaaattagccagacgtggtggcgcatgccagtaatgccatccatctacttgggaggctgaggcaggagaatcgcttgaaccccagaggcgaggttgtggtgagccgagatcgtgccattgcactccagcctgggaaacgagcgaaattccgtctcaggaaaaaaaaaattttttttaaaggaaaaaaaacccctctttttctagccggaaataccctctttcaggaaggcgcgcctgtgccgcatacgcacactcagttacttagcaaagtctgggctaaaccacccaaggcggagcccaggaacaacagagccaccgcatcccccaccaatcagcgccgacctcgccttcgcaggcctaaccaatcagtgctggtgctgcaagaaagtttccagagctttcgaggaaggtttctttaactcgaattcatccgcccaataattttcttatattttcctaaagaagagaagtgcatagaggagaagggacataatttgttaggatcctttcttacgctatgggaatttggggctcagttgaaaagcctgaactgcgtctggggatgttgggcgcggcgaactactttcagtggcgcacggagacggtgtctatgtaagaagtgataacgcaacacaccttgcacaaatttgcgctctgccaaaccagagcattcaggcacgactggctttgttgggtgaggttgttgtggtgttcctgtggctggacgtgattcgcagcatcctcgtatccgctaacaggtactggcccacagccgtaaagacctgcgggggcgtgagaggggggaatgggtgaggtcaagctggaggcttcttggggttgggtgggccgctgaggggaggggagggcgaggtgacgcgacacccggcctttctgggagagtgggccttgttgacctaaggggggcgagggcagttggcacgcgcacgcgccgacagaaactaacagacattaaccaacagcgattccgtcgcgtttacttgggaggaaggcggaaaagaggtagtttgtgtggcttctggaaaccctaaatttggaatcccagtatgagaatggtgtcccttcttgtgtttcaatgggatttttacttcgcgagtcttgtgggttcggttttgttttcagtttacctaacaccgtgcttaggtttgaggcaggttggagttcggtcaggggagtttgaatatccagaacaggtagtggagaaagttgtggacgcttggttagagagcgctctggattctccactgttgacattgaaaccttgagtgacgaattttgtattaagtgacttagcctcataaaaatcaggggaggtttgcggaatgttaccatgtttaaggcattttgaaggagtagttgctaactttgaagcatattagatgtaaaagcaagaaatacaatgatcctgagatgacacgcttatgttttacttttaatctaggtcaaaatgcggatcttcgtgaaaacccttaccggcaagatcatcacccttgaagtggagcccagtgccactatcgaaaatgtcaaagccaaaatccaagataaagaaggcaatccctgtgaccagcagaggctcatctttgcaggcaagcagcgggaagatggccgcagtctttctgactacaacatccagaaagagtcgaccctgcatctggtcctgcgtcggagaggtggtatgcagatcttcgtgaagaccctgaccggcaagaccatcaccctggaagtggagcccagtgacaccatcgaaaatgtgaaggccaagatccaagataaagaaggcatcccccccgaccagcagaggctcatctttgcaggcaagcagctggaagatggccgcagtctttctgactacaacatccagaaagagtcgaccctgcatctggtcctgcgtctgagaggtggtatgcagatcttcgtgaagaccctgaccggcaagaccatcaccctggaagtggagcccagtgacaccatcgaaaatgtgaaggccaagatccaagataaagaaggcatccccccgatcagcagaggctcatctttgcaggcaagcagctggaagatggcggtactctttctgactacaacatccagaaggagtcgaccctgcacctggtcctgcgtctgagaggtggtatgaagatcttcgtgaagaccctgactggaaagaccatcaccctggaggtggagcccagtgacaccatcgaaaatgtgaaagccaagatccaggatgaagaaggcatcccccccgatcagcagaggctcatctttgcaggcaagaagttggaagatggccgcactctttctgactacagcatccagaaagagtcgaccctgcacctggtcctgcgcctgaggggtggctgttaattcttcagtcttgcattagcagtgcccactgatggcattactctgcactatagccatttgccccaacttaggtttagaaattacaagtttcagtaatagctgaacctgttcaaaatgttaataaaggtttcgttgaatggtagcatacttggtgttttgtcatgatattctctagtgatgtgtgggtacacttaaaactggtgaaaatgtctagggagggatttaattttgagattggtaatgtgcccaaagttaagtcacttgactctggtatacacttgggtgggctgaggggtaagagccttctttgctgtaagtcattacaagttaggatcctggactaatggcaaactttctgaagctcgaatttaaagtctgttgggagtccgaggtgggcggatcacgaggtcaagagatcaagaccctcctggccaacatagtgaaatcctctctctactaaaaaaaattagctggatgtgatgtcgcctgcctgtagtcccagctactcaggaggctgaggcaggagaatcagttgaacctgggaggcagaggttgcaatgagctgagatggtgccactgcaccccagcctggtgacagagcaagactccatctcaaaaagttggatatgcaggcttttttaaagatggtcttgctctgtagtccagactggtatacagtggcacaatgacagctcaccgtatcattcttgggctcaagtgactgcagggattttctttacaaatatgcctgcctaggcctaatcaaagattgctggagaaatagttttgattgaggctgcctgaatagtggtaacgtaactgctttcaattctgcaattattgggtgactatgagctgtgtgtttattgctctgtagtgtagtaacaccgaagtgtttaacctgggtggtagtatgggaccgtaatcttgtctgtttgctgtatatgttttaaatgatgagccaagaagcagctaattactgagtatggaagactactggctgaggagaaagatggcttgcaggtacttaatgtttaaaactgtatcctgatctaagacaatcttcctggtcttgatgagttaggtggcaaattaaagtggttcctcacacagttggtttttgtttttgtttttgttttttttgagacagagtctcactcttttgccccaggctggaatgcagtggtgcgatctcagctcactgcaaactccgcctcccaggttgaagcaagtctcctgcctcagccccccacgtagctgggactacaggggcccaccagctaatttttgtattttcagtagagatggggttttaccatattgaccaagctggtctcaaaagtcctggcctcaagtgatccacccaccttggcctcccaaagtgctgggattacaggcatgagccaccactccgggccacgctgttgtttcttaatgtctaacagcttaactttattgtgaaagactgcagcaacaaatgagattttatctgtatttggtaaaaatgcttatccttgtctaagtctggcaacataagcagtttttaggcttctatcccaatggacattaggcagtaatacatgcgcagtgctaatagaaaatatttgagggagtaagggtgtactaaggaagttctcaaatcttcctgcttcactatcttctgtaatacaacttcagtaaatgtgattctcatcttggcacaaaattgggagtagtgtggggagccctgtttaattttttttttcaggtttatagtagggaaataatgttttctggtactaaaactggcgtggtaagtgcatacttagggtaaggactttaaatcactggccagttaatctctagttggtggtttagcatgcaagaagtacccatgggtatattacacaaatgcgggaatagcatatctagaaataagcctttgatattcatagtgtacctgagaatggtttcacacataattttaggtaatctgccttagtcactctggttttacggatctttgcccacagttcctggttcataacttctatagcccttgttatagtcatgttgggtgtgttaggccacaggaaactcacttaacttctgcccttttaccttccctaagacaggactcataatcttcccctacctttctgagtcctgagacccccatttcagagagggttctgtcctgtaccctggggaaaggaatgctgtcatcgtgaagcctccttagaaaaccaagaggactgagtttggatatctgaacacatggaggttcctggaggatggcacacccaagtaaggcattaaagctttgcaccccttcccccataccttgtcctatgcatctcttcatctgagtcctttgtaatatctttataataaaccagtaaacgtggccaggcgtggtggcttatgcctataatcccagcactttgggaggtggaggtgggtggatcacttgaggctagagcttgaggccagactgggcaatgggctctttacaaaaaaaaaaaaattaaaatgggcatggtggcatatacctgtagtcctagctacttgggaagctgaggtggaaggattgcttgagtccaggagttccaggccagcctagcacagcaagatcttgtcactaaaaacctagctcttcaaacctggaaaattaaaacgtttcactgaatacctaaaaactattatctggggcaatagggcttaaaatattgtgctgtcatttctcccaaagtgtcactgtctgacaatataggctcataggtctgtagtctggtgaatccttcagaagaagattcagctgttgctctttagttctcttttggaatattttattttccatagagatccccctctaagtaattcatggatctcagcaaattcactctgcacacaaatgaatctgagcaattttgagacagagtcttgctctgtagcctaagccagactgcagtggcacaatcttggctcactgcaacctctgcctcccaggttcaagcgattcttgggcctcagcctcctgagtagctgggattacaagagtggtcaccacacccagctaatttttgtatttttagtagagacggagtttcaccatgttggccaggctagtcttgaactcctgacttcaggcgatctgcccgccttggcctcccgaagtgctgggatcacaggcgtgagccactgcacctggccagggaaaggctctttaaatatgtgttggaggcctggtctatggcctgatgccagtccaaaatagttcttgtcagctctcagttaaataaaaatgagaacagcggccaggtgcaaaggctcacgcctgtaatcccagcactttgggaggacggggtggggggcggggtgcggatcatgaggccaggagttcgagaccagcctgaccaacatggcgaaaccccgtctctactaaaaatacaaaaaattagctgggtgtggtgtcacgcacctgtaatcccagctacccaggagggtgaggcaggagaattgcttgaacccaggaggcggagattgcagtgagctgatatggcgccactgcactccagccttggcaacagagtgagacttcatctcaaaaaaaaaaaaaaaaaaaaagaacagctcagtggattttacataaaaaatgtattcaacttaaaagacatgtcctctgtaaaaatgttgtggtctaatggtttagtgtgactctggatacaagacttcttgagtcaaatctggctgcttactagcttgtaacgttgggcaactaatcctgtcagtacatcaaattcctcatctataaaaattgggttaattacacctgtctcagactagttataattacctgtgaagcacttaaaacaatgtaaaaacttggccaggtgaggtggctcatgcctgaagtcgcaactacttgggaaacaagcagaatggcttgagcccaggaattcagggctgcagtgagttaccaggtaatgccactgcactgcactccagcctgggcaacagaatgaaaccctgtctctaaaaacaaaacaaaaccaaaaaccccacacacttgcgtagtgcttaatatgctattttttgtaataaaattaccaatcaagatgagatgataggctgggtgctgtggctcacacctgtgtaatctcagcactttaggagcccaaggtgggaggatcgcttgaacctggtagtttgagatcagcctgggcaacatagtaagaactcatctctacaaaaaatgaaataaaaggcgggaggatcactgcaatgaggttaacgctgcaatgagctgtgatcttgccactgcactccagcctaggtgatgggagtgagaacctatctcaaaaaaaaaaaaaagatgataatgcaataagtaaactgaatgaaggtgataggaacttcgtggggcaatatccaatagaggaaaaaatgctataggaaaaaatatgcctaagcacaaagacaggtgggccactgttaacaatggttgcttcaggagaatagaggagtagttttaaagggaggtatatttcagctcctctctagatattcttaaatctggcacccacataacatcagcattgtccacaagcactccatgtttaagagccagcaatataacagccctgaagtcagactgtgtttctggatagagtagacattttgcacaaatctctggttcaatctctatcactcctatagggcctctagaaactttatctcatgagacttcctgaaccgcgacacacttcattttagctacactttattcattcttcaaagaatctgagcaggcaagccatgactctattttaatcaggcccagctaactctaaatggaagctttagatacatgttgggttctgggaaaggatcttgtacttagcgcagcaataattatttagtatatgagcacttagtttccttagtctgacaataagtacttagtttcctcagtgcaacaaggaagtaggttttgaggtttttccttttttcatacttttttcttatcttttttttttttttttttttttttttgaggcagagcctctctctgtcacccaggctggagtgcagtggcatgatctcggttcactgcaacctccacctcatggattcaagctattttcctgcctcagcctcccaagtagctgagttttatactttcttaatctcccacttttttttttttttttgagacggagtcttgctcttgtcgcccaggctggagtgcagtggtgcgatctcagctcactgtaacttccgcctcccaggttcaagtgattctcctgtctcagcctcctatgtagctgggattaccggtgcccacagccacgcccagctaatttctgtatttttagtagaaacagggtttcatcatgttggtcaggctggtgtcgaactcctgacctccgctgatttgccaacctcggcctcccaaagtgttgggattacaagcgtgagccaccgcgcccagctgatctcccacttttttttttcttttttcttttttgagaaagagtttcactcttgttgcccaggctggagtgcaatggcacgatcttgccttactgcaacctccacctcccaggttcaagtgattctcctgtctcagcctcctgagtagctgggattacaggcaggcaccaccatgcccagctaattttgtatttttagcagagacagggtttcaccatgttggtcaggctggtctcaaactcctgacctcaggtgatccgcccgcctcagcctcccaaagtgctgggattataggcatgagccaccgtgcctggcctcccactttttttaatcatcaaatgttgggtggtgaagttcactctccgccagtaggtcccagacagctcctataaaattctaaaacctattctaaccacacaacactaaccagggccccttttaagaaacactattatcttcagaaatttctgatatcagtgtttccccaaactatcttccaaacattacaaccagtacgaaaaacgatgctgtgatcacaaggagttatccattatctccctcctgaagacctacaatgtcctacaattgtacattagcatatttaagtctctaaggagttctaccttataggaactggtttaacattgtttaacccagtgttttccaattttcaatttcacttatgtttcactttttttttttttttttgaaatggcattttgctcttgttacccaggctggagtccagtggtgccatcttggcttacggcaacctccacctcccaggttcaacagtgattctcctgcttcagcctcccaagtaactgggattacaggcatgagccaccacgcctagctaattttgtatttttagtagagatggggtttctccttgttggtcaggctggtcttgaactcccgatctaaggtgatccacccacctcagcctcccaaagtgctgggattacaggcgtgagccactgcacccggcctcacctttttttggtgggggagacaaagtcttggtctgtcacccaaattgaagtacagtggtgtgatctcgcctcactgcaacctctgcctcccaggttcaagagattctcctgcgtcaccctcctgagtagctgggattacaggcatgtgtcactatgcctggctaatttttgtatttttagtagagacagggtttcaccagtttggccaggctggtcttgaattcctggcctcgaatgatccacccactttgacctctcgaaatgttgggattacaggtgtgagccattgcgtctggcaatcatttttttttctttgtccccaaggccggagtgcagtggcgtgttctcagctcaccgcaacctccacctcccaggttcatgtgattctaacaggaggtgacatattattattaatgaatgataatagttaactcttatttacgcttaccatgcaataggcattattctaaggttttacatgaactggcttatttgattttcacaactatccacccacttaggcacacagagctggggtttgagcccagacaggctggctccagagttcttgctcttaatgcttcgagataagatctcctgagagaataagcagaagtcagtcacataaggatctggaaaacaacattccagaaaatggactaagcaaggctcaagtttctgaggctagccagcactgagatatttagagatccacctacctcagcctcccaggtagctgggactacaggtgtgcaccaccacgcccagttaatttttgtatttttagtagagatagggtttcaccatgttggctaggatggtctcaatctcttgaccttgtgatctgcccaccttgcctcccaaagtgctgggattacaggtgtgagccactgcacctggccatcactttctttttcaatgacataacatttctcataatttgagaaacagtgttcaagccatgccctgtctcctgtctccgtatctagtactgctgattgtgcttggttctaggcgtctttcgatgatagaaacatgctgctgtgaattcgaggcaggctgcacactgggcttggatcttctacttttaaaatagaacaatacaggctgggtgtggtggttcacgcctgtaatcccagcactttgggaggatgaggtaggtggatcatctgaggtcaggagttcactatcagcctggccaacatggtgaaaccccgtctgtactaaaaatacaaaaattagctgggcatggcactgggcacctgtaatcccagctactcaggaggctgaggcaggggaatcactggaactcgggtggcagtgagatcccgccactgcactccagcctgggtgacagagtgagactctgtctcaaaagaaaggaaaagaaaagaaaaaagcatgaaaaaaggaaaagcaagactccgtctcaaaaaaactagaacaattcaaatattgagggggacgaagacttggtctgttgcccaagctgaagtacagtggttcaatctcggctcactgcaacctccacctgccaggttctgaggcggaaaatgaacgaaaaataaaatttagaagaaagagaaataagttttcctatattaggctgacttgtgcagcaacgggcacagcccagacccaggaaaagtcttgataatattatctaatgtgctctggagattctcccagcactccctcaacattgggagaagaaaaacaaattttcctttgttttatggaatgagtttatagattcttgttctctgtaactaatgacttcaagtattctgttttatctaagaagtacaacgaaggtcacaagaagcctgagtaggcctgaactacagctgcctgagcaccatagtgaaggttataggataagcctgtgccctgacaaacctagataacagacatctgggttgcttggcaacagtcatgtgcaatcctgtctttgtcctgcctctgtatccctgatttcatgccactgtaaccttgcttcaagctagcccacccccttttctgaagtgtgtataaaagtcaggtgctgtctttattccgggcccagtcttttacacgtgagtcagccgggcctgagtgcactcaatattctcctgtttcaacccgaggtctctctcgtcctcctgaatcccgcaacagttcaagcaattctcctgcctcagccttctgagtggctgggaccagaattgtgtgtgccataggtgtgtgccactatgctcagctaatttttgtatttttagtagagacagggtttcaccatgttagtcaggctggtcttgaactcctgacctcaggtgatccatctaccttggcctcccaaagtgctgggattacaggtgtgaggcactgcacccggccaattttttgtatttttagtagagatggggtttcactgtgttagccaggatggtctcaatatcctgacctcatgatctgcctgccttggcatcccaaagtgctgggattacaggcgtgagccatcatgcccggtttatagattatcttaatcagttgctactttgctgcagcttgtctttaagcatatgttaccagaaaaattaacagacaaatttcgacatggaatttttttttttttttgagacagagtcccactctgtcgcccaggatagagtgtagtggcatgatctcagctcattgccacctctgcctcccaagttcaacggattttcctgcttcagcctcctgaatagctgggatacaggcgcacaccaccacacccggctaatttttgtatttttagtagagatggggtttcaccatgttggccaggatggcctcgatctcaaggtgggtgatccacccaccttggcctcccaaagtgctgggattacaggcatgagccaccatgcctggcacacacctggctaatttttgtattttttagtgtagacggggtttcaccatattggccaggctggtcttgaactgttgacctcgtgatccgcccacctcggcctcccaaagtgctgggattacaggagtgaaccaccgtaccaggcctggacatggaattttaaaaaattatctaattcgttgctttcttctgagagagagtctcactctatcgcccaggctggagtgcaatggtgcaatcttggctcattgcaacctctgccctttttttgaggcagagtctcactctttgcccaggctgtagtgcagtggcatgatctcggctcactgcaacctctgcttccaagggtcaagtaattctcatgccttagcctctggagtagctgggattacaggtgtgcaccgccacacccacctaattttttttttttttttttgagatagagtctcactctgtcgcccaggctggagtgtggtggcatgatctcagctcactgtaacctccacctcctgggttcagtgattctcttacctcaccctcccaagtagctgggattacaggcgcacaacaccatgcccagctaattttttgtacttttagtagagatggggtttcaccatgatgcccaagctggtttcaagctcctgacctcaagcaatccacctgcctcagcctctcaaagtgctaggattacaggcatgagccaccgcaccctgcctaatttttgtatttttagttgagacagggtttcaccatgtttggtcaggctggtctcaaactcctgacctcaggtgattagcacctctcttacaggcctgagccaccctgcccggccctagtttagttttgttttttcaaaacagggtctcactctgttgcccaggttggagtgcactggcctaatctccgctcattgcaaactctacctcccgggttcaagcgactcttctgccttagcttcccaagtagctgggattattggtgcccccagccatgctctgcttttcatattttttagtagagatgggttttcaccatgttggccaggctggtctcaaactcttgacctcaagtgttctgccccccgaagtgctgcatttacaggcatgagccacggtgaccagcctgattggttttgtaaaatacaaaagtgatacaagctcttgataaaaatacattcagtggcatataagagtatccagtaggctgggtgcgtggctcacacctgtaatcccagcactttgggagtccaaggcgggcagatcacttgaggtcaggaattcaagaccagcctggccaacatggtgaaacactgtctctactgaaaatacaaaaattagccaggcgtggtggtgcacgcccatagtcccagctactagggagactgaggtaggagaatagcttgaacctgggaagcggaggttgcagtgagccaagatctcgccattgcattccagcctggctgtcgcaaaaaaaaaaaaaaaaaaaaaagtatccagtaaaaactcccctctcacctttccttgtatccccagaagaaaccgtttaatgagagtatatgttttcatttatttattcattcaacaaatattaggtgtttgctgttttttaaaaaaatgtaatttaagtttttagagtcagggtctcactctgtggccctgcctggagtgcagtgacacaatcatagcttactacagccttaaactcccgggctgaagcgatcctcacaccttagccacccgagtagctaggactacaggcacctgccaccacaccaggctaattaaaaaacttcttcttcttcttttttttttttttgagatggagtcttgctctgccgtccaggctggagtgcagtggcgccgtctcggctcactgcaacctccgcctccctgcctcagccttcggagtagctgggattacagacgtccgccatcatgcccggctaattttgtgtatttttagtagagacggggtgtcgccaccttggccaggctggtcttgaactcctgacctcaggtgatccacccatctcggcctcccaaagtgctgagattacaggagtgagccacggcgctgggcttttttttttttttctttttagacggagtcttgctctgttgcccaggctggagtgccttggtgctatctcagctcactgcaaactccgcctcccaggttcatgccattctccggcctcagcctcccaagtagctgggactacaggcgcccaccaccacgcccggctaatttttttgtatttttagtagagacgggggtttcaccgtgttagccaggatggtctcgatcttctgacttcgtgatccgcccgcctcagcctcccaaagtagtgggattacaggcgtgagccacagagcccagccgacgcctttttttttctttcttttaaagagatggagtctcaccgagcactgtggctcacgtctgtaatccccaggactttgggaggccgaggcgaggggatcgcttgagcccaggagtcgagaccagcctggacgacatagcgagacttcgtttctgaaaaaaatgcaagcattttgaacccgggaggcggaggttgcagtgagccgagatcgtgccgctgcactccagcctgggcgacagagcgagactccgtctcaaaaaacaaaacaaacaaacaaacaaaaaaacaagcaaacaaacaaaaaaaaaaaccaagcatttggcaggcatggtagcgcacgcctgtggtcccagccagccactctggaggctgaggtgggaggatcgcttgagccagggagttcgaggctgcagtgagcggtgatcgtgccactgcactccagcctggaggacagaggcagaacttgtctcaaaaaaaacaaaaaacaaaaaaccggccagtgtgtgaggggcgcgcgatttttaagatgtgagagagggaattgtgcgtcaccatcaccaccaggtgtcgcgacatcgggtgccgcgccgtcccgcttctgaggcgcggtggcctgagaaactggcttcagagcccgctcttcctagccttctgcccgaaaatgcagaatttggggaattggaactttggaggcgggagcgaaagacctctccttctctcgccggaaatatccctctttcgggaagcgctcccctgccttccggaaaggaagagccctgatcgcgcccctgcactcaagcctctgggtgatagagcgaggagaccctgtctccaaaacacaaacaaacaaaaggtaatggggggggggggggcaggcgcggtggctcacgcctataatcccagcactttaggaggccgaggcgggtggatcacctgaggtcaggcgttccagaccagcttggccaacatggtgaaacccccgtctctgctaaaaataccaaaaaaatagctgggggtggtggcaggcacctgtaatcccagctactcaggaggctgaggcaggagaatcacttgaacccgggaggcggaggttgcagtgggctatcacaccgttgcactccagcctgggcgacaagaatgaaactctgtctcaaaaaaaaaaaaaaaggtagtaggaacattgctggtaattgctgtgtgagcacactaataccacatttatacctgtctttctgaacttctatgacaatgtaaacatgcatatgtatatagatatctccatatatagttactctcaccttgttcacagctgctcttacactagatatacaattttctccttcaaataatgttaatgctaactatgaatgtaatatatgctcagtgtatgaaatttaggaaatatagaaaaagaaagcactcattatccctacgatccaagtatattcagtttggcatgtttcctcttttcccagtattaattttttacttaaataacaatgaatacaatacaagttgtaaggacttgaccagcagatatacagagagtgagtaaaaacattgaagtcctttttcagcgtcccttcccagatgtcctcttcccacacatctttttctgtgccacttgctagaagtttggtgtatttacgaccagattgttttcaatgtgtcacatatgtttgtgttatataaaaacatactttaaaaatcatatataaatgcaattatgcattacacacccatctttcttggagacatttccatgctaacacatatagatgtgccttattcttctcaaactgctgcaaaatatttcatggtatagatacaccatattttacccttctccttactgatggtatttatattgtttctaatttttactattaaaacaatactgcaattaatatctttgtaaatgtctcttgtcacaaatgtgcaagtatttcttcaggatatactagaagtagaattgctgtatcaaagattatggcatttaaaaattggggattattacagaattacccatcaacagactgtacaacaatggaatattattcagccttaaaaggaagaaaattcggctgggcacggtggctcaggcctgtaatcccagcactttgggaggccgaggcggacggatcacgagatcaacagatggagaccatcctggctaacatggtgaaatcccgtctctactaaaaatagaaaaaatagctgggcgtggtggtgcacacctgtagttccactcagctacactggaggctgaggcaggagaatcgcttgaacccaggaagcggaggttgcagtgagccgagatcagggcactgcactccagcctggagacagagtgagactctgtctcaaaaaaaaaaaaaaattctgctgggcacagtggctcatgccagtaatcccaacactttgggaggccaaggtgggaggatcactcgaggcccggagttccagaccagcctggccaatatggtgaaaccctgtctctactaaaaatgcaaaaattagctgggtgtggtggcgcatgcctgtaatcccagttactcgggaggctgaggtaggagaatcacttgaacccgagaggtggaagttgcagtgagccaagattgagccactagtggcactctagcttgggcgacagagtgagactccatctcaaaaaaaaaaaaaaaaaaagagaccagccttgctaacatggtgaaacgcatctctactacaaatacaaaaattagctgggcgttgtagcaggtgcctgtaatcccagctactctagaagctgaggcaggagaatctcttgaacccgggaggcggaggttgcagtgagccgagatcgtgccattgcactccagcctgagcaacaaaatcgaacctctgtctcaaaaaaaaaaaaaatggaacttctgacacatattaccacatggatgaatcttaaagacattacactaaatgaaacaagacagacacaaaaggacatatactgtgtgattccactatatgaggtagctagagtagtcaaactcatagagacataaagtagaatggtgggtgccaggggctgggaaaggagggaatggggagttagtgtttaatggggacagagtttcagttttgcaagatgaaaaaagttctggagatggatggtggtgatggtcacacacaatgaatattaatgctacgaaactgtacacttaaaaatggcttaaacggtacattttttggtatttatagttgatcacaatttttaaaaagactgtaccaatatcaattcccaccagtattgcataagagagagtatctagtcctccaccacttcattaatattatacattatgaataatttcaactttgaacatattgaggggcaaaaacaacacttgattgttttaatttgcatgtgcccaattacttctgagattggataccttttgaatgtttacttaacattaatttgtcttgcaaattatctgttcatttcctttgcccaattttagtatgaatttgttcgactatatattctaacaactaataatttatttaattgtggtaaatattgtctttcagacttgcttcactttttttttttttttttttgagacagtgtctcactctgttgtccaggctggagtgcagtggtgtgatctcagctcactgcagccttcacctcctgggttcaagactcccaagtagctgagcttacaggcacacgccaccacacccggctaatttttgtatttttagtagagacaggatttcaccatgttggtcaggctggtctcgaactcctggcctcaagggatccgccttcctcagcctcccaaagtgctggaattacaggcatgagccactgcacctggccttacttcacttttcaattatggtgtcttttgtaaaaaagaagtttttaattaaaaaaaaaaagctcccatctctccaaaaataaaaaattagctgggcatggtagctcacacctgtggtcccagctattcgggagactgaggtgggaggattacttgagccgagggggtcgaggctgcagtgagctgtgatctccccactgctctccagcctgggcgacagagcaagaccctgtctcaatcatcatcatcatcatcatctgacaatctttttccttatggcttctgggccaaaggaataaatgaaggtataaggcttgttgataactattaataacacacattaaaaaaaaactatgcataacacacatttgaaatctacagcacattgcctgaagttagcatgttgggttctggctctgtctcttgcttcaacagtgtttagaacgaacagaccagggggatccctcttccagcctgtgatcgcctcccatctccttttcacttgagcctcccagaccatcttcttggcaacctcctgcttctgggcccagccaacaccgtttttgtggatatcttcttcttgtccccaagcatgagctcctagatgtgttagaatgattccacccaggcagaggcagccaccaactgccccgtcaaccggcatctctctggacttctactttggccacgatgacatggctctggaaggtgaactggccaagcatctctggaagatgcaaagccagcgtggcagcctgctcttttgcaggacctgcagatgagatgaatgggataaaaccctggacgccgtgggggtagccctggccctggagaggagcctgaacctgggttctgctgacacagacgtcacctctgggacttcctagagaggcctttcctagatgggggagtgaaactcgtcaagagggtggatgatcacctgacctctgcgggctggccacctggagccgggccaggcaactgtcttttccaaagtctggccaccctcaagcatgactgggagcctagcgagcccagtgacctctgagaggctcctctcaaaggatcagggtttctgcctgcctgagcctccccctccagccactaggcagctttttaaccctggagccctctcccaagcctggatcaaatttgcagggacaaaacgggggcaggggctggggtggggaaatcaaattaatgaccttcttagggtaaggatgttccaggaagaggaaacctgccatcccacaacccctagaccataatagcaattattccctccagggatcaacaaaccagtgacagactctagaaccattgaaatctactgattaaggccaggcgccgtggctcccacctgtaatcccagcactttgggaggccaaggtgggaggatcacgaggtcaggagctcgagaccagcctggacaaaatagcaaaaccccgtttctattaaaaatacaaaaaaaatttagctaggcgtggtggcgggttcctgtaatcccagctactcaggaggctgaggcaggagaaccacttgaacctgggaggcagagattgcagtgagccaagattgtgccattgtactccagcctgggtgacaagagcaagactccatctcaaaaaaaaaaaaagaaaaagaaaactctactgattaatgcctatcttaactccagtgtcagtagtagctttgacaaaggccttttatatcacatggctatactttgccaagcatactgaacactattataattgtttcctaataccccatgtgatacccacatgcttcttcataagtttgtaacacatttaaaaatagcatgacgccaggggtggtggctcatgcctgtaatcccagcactttgggaggctgaggcaggttgatcgcctgaggtcaggaattcaagaccagcctggccaacatagtgaaaccctgtctctactaaaaatgcaaagaattagctgggcatgggctgggcgtggtggctcacacctgtaatcccagcactttgggaggctgaggtgggcggatcacctgagattgggagttcgagacctgcctgaccaacatggagaaaccccgtctctactaaaaatacaaaattagccaggtgtggtggcccatgcctgtaaccccagctaattgggaggctgaggccagagaatcacttgaacccgggaggcagaggttgcggtgaaccaagatcgcatcaatgcaccccagcctaggtgacaagagcaaaactccgtctcaaaaaaaatttaaaaaaatgaattagctgggtgtggtgggcgggagcctgtaatcccagctactagggaggctgaggcaggagaattgcttgaacccaggaggcggaggttgtggtgagccaagatcacgccattgcactccagcctggacaacaaaagcaaatctctctctctcaaaaaaaaaaaaaatcagataatctagaatggtaaaaagaagagagtaaaattacctaaataaattaccaaattcccatcatctggaggtaactattcatagcacagatttttaaaaaatgggttatcatataatgctttctattttttatcctgcttttttaaacttaatttttctacttacattgttttatgctaataaatatatatcttcattgaaataactgcatagctttctgttgtatatatcataatttatttaactcatactaatggggcatttgtaaacaaatctatgatagaaatgcatctcttcatatatatatgtgtgtgtgtttgtgtgtgtgtgtgtgtgtgtgtgtgtgtgtgtatttagagataggctcccactctgctgcccaggcttgtgtgcagtggtgcaatcatagctaactgtaaccttgaattccggtgtcaagtgatcttcccatctcagcctcctgagtagctgggaccacaggcaggtgccaccatgcctggctaatttatttttatttttatttttttgtagagctggggtctcaccatattgcccaggctggtctcaaactcgtggcctcaagtgatcctcctacctcagcctcctaaatcattgggatttagaggcatgagccactgtgcccagtctcttgacatattttgtaaataaaaaacaaggaagaaatatttataacacaggcgtgtgccaccatgcccagctaattttttgtacttttagtagagacagggtttcacaatattggccaggctggtctcaaactcctgacctcaagtgatccgcccaccttggcctcccaaagtgctggcattacaagcatgaggcattgcgcctgaccttaaaggactaatttctttcttttttttcttttcttttgagacaggatcttactctgtcacccagactggagtgctgtgataaaatcacagctcattgcagtctccatgtcccaggcgcaagtgatccacatcagcttcccaagtagctgggactacaggggcacatactacacctggctaatttaaaaaactctttgtagagacaggttcttgccatgtttcccagactggtcttgaactgctgacctcaagcgatctttctgcctcagactctgaaagtgctgagattacaggcatgggccactgcacccactgaaaggactaatttcttcaatatgtaagtggtttctataaatatatgagaaacagattaataacacaataggaaaatggacataggacaggagcaaacaattcacagaaaagaaaattgttcctttttttcttttgagatggagtcttgctctgtcacccatgctggagtgcagtggtggcactatctcggctcactgcaagctccgcctccggggttcacgccattctcctgcctcagcctcccaagtagctgggactataggtgccggccaccacgcccggctaattttgttttttgtatttttagtagagacgaggtttcaccgtgttaaccaggatggtcttgatctcctgacctcgtgatccgcccccctcagcatcccaaagtgctgggattacaggtgtgagccaccatgcccggccaaaaattgttcttaaacacatgacaagatgtgcagcttcacttagcataagaaaaatgaccattcaatgtatgaagtggcattttttaatatttcagattgacaaagataaaacaagactgttaatacttttgtttacaagagtgcagagaaatgcatcctcatgcattgttggtcagtgtaaactggtacaacctctttggaaggcagttgggtaagtagctatgaaaatctcaaatgcagctgggtgaggtgcctgtcatcccagcactttgggagactgaggcgggtggatcacctgaggtcaggagtttgagatcagcctggctaacatagtgaaaccctgtctctactaaaaatacaaaaaaaaaaaaaaaaaattagccaggcatggtggcaggcacctgtaatcccagctacttggaggctgaggcatggagaattgcttaaatccaggaggcagaggtttcagttagccgaggtggcaccactgcactccagtctgggcaacagagtgagactccatctcaaaaaacaaacaaacaaacaaacaaaataaaatctcaagtgcacgtaccgtttgtgccagtaattccacaaccgggaattttacagatactctcacagatgtgaaaaaagaagtatgcgcacagatgttccctgcagtatcgttaataatagaaatacactcaaggccgggcgcggtggctcacgcctgtaattacagtactttgggaggccgagatgggtggatcacttgagggcaggagttggagagcagtctggctaacatggtgaaacccagtctctactaaagatacaaaaattagccaggcgtggcatcacacccctgtagtcccagctactcaggaggctgagttgggagaatcacctcaacctgggaggaggaggttgcagtgagccgagatcacaccattgcactccagcctgggtggcagagagagaccccatctcaaaataaataaaatacaataaaataaaataagaaaggtgaacattagcagcagcaaggcagccatcacctttgctctgtgaagcctgtggtagggatggatatgaattagctgtggtgggagggactgagtaagctctgggaccatgtggctctgctggacacagcaggggaaggcagtggtccaggcttcccaaaaaccagccttgaggaataaagataatgctccgaattttcagaactgctctgctcactctgagtcagagtggaaaatactgactgctgcatctagcaaaggagatgtttcagcactgttttgggaagaagggcctgtagggcttatctgacgagggccttactgtcatctccgcatcatgccaagcagcctttccttagacccagggctcccacccccactttcagattagctgccagcctccaacactctgctgttttcctttcctgagaagcagcccctgtgaaagctgtttttctgagcatcaggcctgagcataatctgctttagcagctgaagtggtctgctcttcttttactgaaagcactttaatacagaaattctgttgaccttttagatttatatatgcttctccctcccctctgggcttttcctggaagtaggttggcaaggtttactggaacagtatggttcctacccccacaccagccaagaccttgagaagagagaaggtgctgagccactcaagcacatggccaggggagcttagaaaaacagggacttccaacctgcctgggcaatatagtgagaccccattctccaaaaacaaggaaaaaagaaaaaagaaaaagagggaccctccaaacacaagcagggagaagctgaagaagtgggtgctagaagagcctggagatgtgtagatggcagcctgtctgctgctctgggccttggccattgcctgtgctgctgatgcttctgccgtctcttcttctttcacaaaactacaagagctcaggttgcggctgctcaaaagcttcccgcaatgtgctgattcactctaagtgtctgctcctctgcagactgacttcatgcacttaaaataattcactcatttcattgttagctctgtcctctccacttgcatttcaggccagagcagtacaatgaggtcccaagctctgtcctgtaaaccacagataaaattctaaggcccctccacaaccatctgaatgggcccctcttcttggctaaggacattcccaaggaaatctgaaaatctagttcaggacatgacggaagagcaggtcacacaagcatcattataacctcctcccttttggaattcaggaaaagccaaccagcattaacatcaacacagatcttaagtctggtaagaaacatttacaatctattttctctgaagtttgctacctggaagcttcatctgcctgataaaaccttggtctcaacaactgcttatcataacccagacattcctttctactgataataactctttcttcttcttttttttttcctagacagagtctcgctctgtggcccagactggagtgcagtggccccatctcagctcaccacaacctctgcctcccgggttcaagtgattcccctgcctcagcctgctgagtagctgggattacaggcatgcacaaccacaaccagccaattttgtatttttagtagacacggggtttctccatgttggccaagctggtctcgaactcctgacctcaggtcatccacccgcctccgcctcccaaagtgctgggattacaggcgtgagccatggcccctaaacaactctttcaaccaattgccaatcagaaaaaatttaaaatctgcatgtgacctggatacactccccacaagaacttcaagttgtcctgcccttccatatggaaccaatgtaagtcctatatgtatttgactgatgtctcatgtctccctaaaatatataaaactaggctgtgtcttagcaccttgggcacctgctctcaggatctcctgagggctgtgtcatgggccactgatcactcatatttggctcagaataaatctcctcaaatacatttttgccaacagtccactgggctcaggtgagcagggcctgaaacagataacatggaaatttataataaaataagggacccatgccttaagacataccacaaagtaaatataacactgtacaggctctctcgggtgaccctggactacagaatgtgggttgtggggagggagagacgtggactttttcctgcaggtcatggcttgggtgcacctagaaacaggccaataccaccccttcttttctggaaaggtggggcctgacagctttgcgtggggaaccagtgtcctgttacagttcaggtctaaaatgcctgctgagtaaataaacatgttgttctcaacctaacccaaaaagcctgatatttgtaggaataaaattgctctttcctaccctgggcaaactgcttccctgacaaatatgctcagtcatggagtggagacagataagtaaagagatgctgggaatagagcagagacagataagtaaacagatgctggggatatgtcatgatacagagccaggccagagtcaagcaaggtgttgcattggcatactgccggcctttcctgcaggaaaaggtgtgaaaaagctcttgaggtgatgggaaggggtgtgctgttttgaaatgggaagataaaaacagagccatgggggttctgcaccatcgccttggaacaaatggtgtctgcctccacatctgcaatgactcagatctctgctctgggcatacttgcagtcaaatcagggctgcccagacatcctgtgtttgtgaaatgctgagaaagactaactggcttccagcagttgcctactcatccaccctcttccaaacacccaggctggggagtaacattttggggatgagtccttgtaatgctgcttctctctggagagcaatgtgtgaaaattgacccaaggagttgtctcatgggatgaggcataattggctgtcttttttcggaacctccttgaggctcatctacccccgtgccctgagctcactggggcctgcctggccaaacagaatatacccattaagggaataaatttccaggccacaataacaagcatcaccactttgaaaagaaaaagccatgaactgaaattcttcaaaataagaatttttaattagcccaataaacacattaaaagatataaggaagatactagaactatgaaacaaatgaacacaaaaacaccaaaaagaaccgacaagaaatactaagttgaaaacataacagttgaggctgggcacggtggctcaagcctgtaatcccagcactttgggaggccaaggagggtgaatcaactgaggtcaggagttcgagaccagcctgaccaatatggtgaaaccccgtctctactaaaaatacaaaaactagccaggcgtggtggtgcatgcctgtaatcccagctactcaggagactgaggcaggagaattgcttgaacctgggaggcagaggttgcagtgagccgaggtcgtgccacagcactacagcctgggtgacagagcaagactccatctcaaaaaaaaaaaaaagaaagaaaagaaaatataacagttaatgccaggtgcagcagctaactcctgtaatcacagcactttgggaggccgaggcgggcagatcacctgaggtcagaagtttgagaccagcctgaccaacatggagaaaccccgtctctactaaaaatacaaaattaaccaggtgtggtggcatttgcctgtaatcccagctactcaggaggctgaggcaggagaattgcttgaatccaggaggtggaagttgcggtgagccaagatcacagcattgcactccagcctgggcaatgagagcaaactctggctcaaaaaaaaaaaaaaaaaaaaggtgggggggcggggctcagtggctcaggcctgtaaccccagctctttggtgtagggaaaagaaagagagatcagactgtcactgtgtctatgtagaaaggaaaggcataagaaattccattttgacctataccttgaactattgctttgctgagatgttgttaatttgtaactttgccctagccacttcgccccagccacttcgccccagccactttgccccaactttgagctcacaaaaacatgtgttgtatggaatcaaggtttaagggttctagggttgtgcaggacgtgccttgttaacaaaatgtttacaagcagtatgcttggtaaaagtcattgccattctctagtctcaataaaccaggggcacaatgcactgtgaaaagctgcagggacctctgcgctgaaaagccggtattgtccaaggtttctccccatgtgatagtctgaaatatggcctcgtgagatgagaaagacctgactgtcccccagcctgacacccgtaaagggtctatgctgaggtggattagtaaaagaggaaagcctcttgcagttgagatagaggaaggccactgtctcctgcctgagataggagaaaaaccaccctatggcaggaggtgagacatgttggcagctatgctgccttgttattctttactccactgagatgtttgggcggagagaaacataaatctggcctacgtgcacatccaggcatagtacctccccttgaacttaattatgacatagattcttttgctcacattttttttttttttttttttgctgaccttctccttattatcaccctgctctcctactgcattcctcttgctaagataatgaaaataataatcaatacaaactgagggaactcagagaccagtgccagtgcatgtccttggtatgctgagtgccggtctcctggacccactgttgtttctctatactttgtctctgtgtcttatttcttttctcagtctctcatcccacctggcaagatatcccacaggtgtggaggggcaggtcacccctttacttttggaagccgaggcagggggatcacgaggtcaggagatcaagaccatcctggctaacatggtgaaaccccgtctctactaaaaatacgaaaaaaaaattagctgggcatggtgttgggtgcctgtagtcccagctactcgggaggctgaggcaggagaatggcatgaacccaggaggcagagcttgcagtgagctgagattgcaccactgcactccagcctgggtgacagagcgagactctgtctcaaaaaaaaaaaaaaaaaaagaaaaaaagaaaaaagaaaacataacagttgtactaaagaacacaaatgattgaataaactgcaggatggacagagctgaggaataaattagtggactggaataacagaaattcccctaaaggaagaagaaaaaagaacaggaaatataaaaagaatatacaaaatagaatataaaaaggaaatataaaagaatagctaagggatatggagaataaaagtgaaatggcaacattcagaagataggattcctggaaagagaaagagaaaaatggagaggaggaaatatttgaaaaaataaagaataaaaaattctcagaattaggaaaaaagatgaaatgtgaacacaagatctgtatacagattattcctcattaaaaataattttggccaagcgtggccaggcgcggtggctcacgaaatcatgccactgcactccagcctgggcgacagagcaagactctgtctcaaaaaaaaaaaaaacaaatttttggccaagcgtggtggctcacgcctgtaatcccagcactttgggaggcccaagaccagaggatctcttgaacctaggagttggagatcagtctgggtgggcaaaaccctgtctctaccaaaaaaaaaaaaaaaaaaaaattagcctggtgtggtggcacaaacctgtaggtaggagggtcgcttgagcctgggagatggaggctgcagtgagccatgatcactccactgcacttcagcctgggcaatagagcaagaccctgtctaaaaaaaaatattttggggaaatttaagaataccagagacaaaaagaacattctaaacatttccagagagtcagagatcacagataaaggaagaagaggcctatttacttatttatttatatctttttgagacagggtctcactctgttgcccaggctggagtgcagtggtgccatctgggttcactgcaacctctgcctcctgagttcaagcgattctcttgcctcagcctcctgagtagctgggactataggcgcccgccaccacgcctggctaattttttttttgtatttttagtagaaacggggtttaactgtgttagccaggatggtcttgatctcctgaacttgtgatccactgcctcagcctcccaaagtgctgggattacaggcatgagccaccacaccagcccggtttttcaatatacttgtccatgggtccctaaatgtcttgtcgtagattctttaaaaagagtgtttccaacatgctgaatcaaaaaaaaaaaaatggtttaactctgtgtaatggatctgttcatcacaaaacttttttacaggtagcttatttctagtttttatcacgggacattcagatttttaatacgggcctcaatgggctccacagtgtcccttcatagattctacaaaaagagtgtttccaccccgcccttcatagattttccataaacagtgttttcaacgtgctgaatgaaaacaatggtttaagtcttttagctgaatctactcatctgaaagcattttcacagatagcttgtttctagtttgtattgagagataatcgatttttcactataggcctcaataagcttctaaatgtccctttgtagattctttaaaaagagtgtttccaaccttgtgaatcaaaacaatggtttacctatgtgagatgaatgcacacatcacaaagcattttcacagatatcttgtttctactttttatcatgggatattcggttttccaccataggcctcactgggcttcataacgttcccttgtagattctacaaaatgaatgttttcaacctgctgaatcaaaacaaaggtttaaatctgtgagatgaatccagacatcacaaaggattttcacaggtaccttgtatgtcgtttttattaagggaaatttgatttttcccaacaggcctcaatgggctctaaatgatcccttcctagattctacaaaaagaatgtttccaaccttctgaatcaaaacaaagtttaactctgtgaaaggaatctgcacatagcaaagcattttcacacattgcttgtttctagttttaatggcaggatattcggtttttcacaatataccttaatgggcttcgaactgtccctttatagattttacaaaaggaatgttttctaactgctggatcaagacaaaggtttaactctgtgaaatgaatccgcacatctaaaagcatttccacagtttgcctgtttctagtttttatcgtggcatattcagattttcactataggcctcaatgtgctttgatacgtcccttcttagattttactcaatgagtgttttctacctactgaattaaaagaaaggtttaacactgtgagatgaatccacacattgcaaagaatttccacaggtagcatctttctaatttttatcgcaaatattcatttttttcacaataggcctcaatgggctctgaagtgtcccttcatagataccacaagaagcttgtttccaacctgctgaatcaaaacaaatgtttaactctgtgagataaatgcatgcatcataaagtattttcaaatataactagtttttagtttttatcatgggatattcagtttctcactataggctgcaatgggctaagaaatgtccctttgtagatactgcaaaaaagtgttaccaccctgctgaatcaaaacaagggtttaactctgtgaaataaatgaacacatcacaaagcattttcacagatagcttttttctaatttttatcgtgggatgctttttttccactataggcctcaatgtgctttgaaatgtccctttctagattctacaaaaaaggtatttaaaacctcctgaatcaaaacaaaagttaaactcagggagatgaatgcacatatttcagagaatttttacagatagcttgtttctagtttttatcacgggatattcattttttcactataggcctcatttggctccgaaaagttcctttgtagtttctaaaaataaagtgtttccaacccgcacttagtagattttactaaaacagtgttttcaacctttttaataaaaacaaaagtttaattatgtgacatgaatatacacatcacaaagtatttacatagatagcatgtttctagtttttatcatgggatatgcggttttttactgtaggcctaaatcagctctgaagtgtcccttcttaggttctagaagaacagtgtatcctacctgctgaaccaaaataatggtttagccctgtgagatgaatccacagatctcaaagcatgttcacagatagcttgtttctagtttttatcatggaatgcttggtttctcattataggcttcactgggctctaaaatatccattcgtagattctataaaaagagtgtttccaacctacttaatccaaataaatgtttcactctgtaaagtgaatccaaacatcacaaagcattttgatggatagcttgtttctagttttaatcatgggatattcagtctttttctgtagacttcaatggtctctgaaatgtcccattgtagattttacaaaaagagtgttgccagccagctgaatcaatacaaacgtttaactctgtgagataaatcttccatcacaaagcattttcacagatagcttgtttctggttttcaaggcgaaatattcagtttttcactataggcctcaatggactccaaaatgtttctttgtagattttacaaaagagtgtttccaacctgctgaaacaaaacaaaggttaaactgtgtgagatgaatccacactttgcaaatcattttcacaaattacttgtttctagtttttatcatggaatattcagttttccactgtaggcctcaatgggttccaaaatgtcccttcgcagatactacaaaaagagtgtttccaacctgctgaataaaaactaagatttagctctgtaaaatgaatccacacattgccaagcattttcaccaatagtttgtttctagttctaattgcaggatattcggtttttcactataggcctcaatggcctccaaaatgtccctttgtagatcccattaaaaggatgtttccaacctcccctttgtagattttacaaaaagagtatttccatcctgctgaataaaaacaaaggtttatctctgtgagatgaattcacacatcatgaaacattctcatatgtagcttgtttcaagtttttatagcgggatatttagttttatgactataggcctcaatgtgctccgaaatgtcactttgtaaactgtgtcaaaagagtatttccaacctgatgaataaaaataaaggtttaagtctgtgagatgaatccacacatcacaaaccattttcacagacagcttgtttctacttttcatcatgggatatttggttattcactatagacttcaatatgctctgagatgtccccttttagttctacaacagagtgtttcaaacctactgaatcaaaacaaagatttaactctgtgacatgaaatgacccattgtaaagcatttttacaggtagcttgttcctagtttttattgcagaatattcagttttttactacaggcctcaatgggctttgaaatgtcctcttgtagattctacaaaaagagtaattttggtctgctgaatcaaaacaaaagttaactctgtgagatacatccacacattgccaaggattttcacagatacatttttctagtttttatcatggaatatttggttttttactacagttctcaatgtactctgaaatatcccttaatatattcttgaataagtttgtctccaacctgctgagttaaaacaaagctttaactctgggagatgaatccacacatcacagcacattttcactgatagattgtttctactttttatcttgggacaatctgtttttgactataggcctcaatgggctttaaaatgtcccctcgtagattctacgaaaagagtgcttcaaacttgcttaatcaaagcaaaggttaaattatgtgagatgaagccacacatcacaaagcattttcacatatagcttgtttctagtttttatcatgggagatttgattttttactataggcctcaattggctctgaaatgtaaacttttatattctacaataaaagtgttttcaacctgctgaatcaaaacaaatgtttaactccatgagatgagtccacacatcacaaacattttcacaagcagcttgtttctaatttttattatgagatattcagtttttcagtacaagcctcaatgggctccaaaatgtttcttcatagattctaaaaatagagttgttccaacctgccaaatcaaaacaaacatttaactctgtgagataaatccatacattgcaaagcattttcacagatagcttgtttctagttgtttattgtgggatattttgtttctcactataaacctcaataggctctgaaatgtcccctcatagattctacaaaaaaagtgctttcatcctgctgaataaaaacaaaagtttaactctgtgacatgaaatgacacatcataaagcatttcgacagagagctttgttctagtttttgtcatggcacattcagtttttcactacaagccacagtgggctccaaaatgtcccttcgtggattctacaaaaagtgattttggcctgctgaatcaaaacaaaggttcaactctgtgagatgaatccacacatcacaaagaattttcacagatagcttgtttctagttttcatcctaggatattagggttttttcatgcatttcttcatgggctctgaaatgctcctttgtagattctacaaaaagtgtttccaacctgctgaatcataacaaaggtttaactctgtgagttgaatccacacatcatgaaacattctcatatgtagcttgtttctagtttttatctcgagatataaagtttttaactgtaggcctcaatgttctctgaaatgtgccttcttagattctacaaaaagagtatttccaacctgttgaatcaaaaccaaagtttaactctttgagatgaattgacacattgcaaagcattttcacagatagcttttttctagtttttgtcacagaaattcaggttttcactgttggccattgtggaccccaaaatggccctttgaagattctacaaaaagagtagttccaacctgctgaatcaaaacaaaggcttaaatctgtgagatgcattcacacattgcaaagcattttcacagatagcttttttctagtttttgtcacagaaattcagtttttcactgttggcctttgtggactccaaaatggcccttcatagattctgcaaaaagagtagttccaacctgctgaaacaaaacaaaggcttaaatctccacacattgcaaagcattttcacaaatagcttgtttctggtttttatcacaggatatttggtttttgactttagacctcaataggctccaaaatgtctcctcctagattatataaaaagattgtattccacgtgctgaatcaaaacacagttaacttggtgagatcaatctgcacatcacaaagcattttcacagatagcttgtttctcgtttttatcacaggatattcagtttttcactataggcctcaaagcacaccaaaaagtcttcttgtagatccaaaaacagactgtttccaacctgcttaatcaaaacaaagatttaactctgtgaaatgaatccacacatcccaaagcattttcacaggtagcttgtttctagtttatatctccagatattttgtttttcactacaggcttcaatgggctttgaaatgtttcttcatagattgtactaaaagagattttccaacctactgaattataacaaagatttaattctgtgagattaatctacacatcacaaagcattttcatagatagcttgtttctagtttttattatggtataatttgtctttcattgtaggcctcaatgggctttgaaatggcccttagtagattctgcaaaaagagtatttccaacctgctgaattaaaataattgtttaagtctgtgagacaaattcacacaatgcaaagcattttaacagatattttgcttgagtttttattgcaggatatttggtgtctcaatatactcttccatgggctccaaaatgtccctttgtatattctacaaaaagagtgtttccaacctgttgaataaaaacaaaggtttaattctgagagatgattccaaacatcacaagacctttggacagatagcttgtttctagttttcattgtgggatattcaacttttcaccgtagtcctcaaggagctttgtaatgtcttttcatggaatctacaaaaacagtgtttccaccctgctgaatcaacacaaatatttaactctgtgagatggatccacacatcccaaaacattttcataaatagtttgtttccatttttcatagaagaatatttgctttttctatatatttatccatgggctccaaaatgccccttcatagattctaaaaaaagaatagtttcaatctgctcattcaaaacatatgtttaataatctgagagataaatccacccatcacaaagcattttcacagatagcctgtttctagtttttaatttcaggatatttagtttttcattgtacacctcaatgggctccaaaatgtcccttcatagattctacaaaaagagtgattccagtctgtggaatcaaaacaaatgtttaactctgtgggatgaatccactgactgcaaagcattttcacagataggttttttctagtttttatcatgggatatttggttttttactcttggcctcaatgggcttcaaaatgtcccttcgtagattatacaaaaagagtgtttccaagctgctgaatcaaaacaaagaattaactctgtgacatgaatccacacatcacaaagcattttcacagatagactgtttctagtttttatcatgggatatttagtttttcactatagacctcaattggctctgaaatgtcccctcatagattcttcaaaaatagtatttccagctctgctaaatcaagacaagagattaactttgtgatatgaatatacatatggcaaataatttttagtgataagttgtttccagtgtttttgatgtgatattcagtttttcactgtaggcttcaatggcctctgaaatgtccacacgtaggtggtacaaaaggactgtttccaacatgctgaatcaaaacaaaggtttaactctatcagatgaatccaaacattgcaaaggattttcacaggtagcttgtttctagtttttatcgtgagatatttggatttttactaatggccctaatggactctaaaatgtcccttcttagattttacaaagagagtgtttccaacctgcttaatcaaaacaaaggtttaactctgtgagatgaatctacacatcacaaagcatttttagaaatagactttttattgttattgttgcaaaatattcagatttttaccgtaggcattaatgggtgttgttgggaaaaggtgagtgttgggagaagctgagacagggcttgcatgtctgacataatgtaaaagagtcttggaacatgtccagggtccagggtctaaaaccccttgtggcatttggaacaccaaagtctgtgctaaagggtggaaggctatccagatgcacaataatctaagcccagggcataaaatccctgatggcagggatagaatccagggtttgtggctttggaatgtgtccagaattgctggatccttgctccttgctctcccagaattgattgtatcttgagttagaagaacctgctctccattatctcaagtagcagagcaaatgctaaaccatcacagctgtaaatcatgtgtttaatgcaacacactcttttgaccacattctcaccacctgtttctttgttggattaccaataaatactacgggcttccagagctcaaggccttcatagcctccatgatcgtgatggaccctggtcccactttacttctcaaactgtctttttctcaatcatttgactccaccggacttcatcaaccccacaacctggtgttgggtctgatcaccccaacaggtgtgatgtatcctttcataaatccatgcattgcaaagtattttcaaagatagcttgcttgtagtttttatcacgggatattcaggttttcactattggcctcaatgggctctgacatgtttcttcatagattctacaaagggagtgtttcaaacctactgaatcagaagaaaggtttaattctgtgagatgaatccacacattgcaaagcattttcacagatacttttcttctagtttttgtcaaaggatattcagtttttcagtataggcttcagtgggctctgaaatatcccttcgcagattctacaaaaggagcgtttccaatctgctgaataaaaacaaaggtttaactctgtgagatgaatccatactactcaaagcattttcacagatggcttgtttctaacctttataatgagacattcaatttttcactattggcctcaatgggctccatagtgtctcttcctagattctacaaaaacagatttttcatttctccaaatcaaaataaaagtttactctgtgatatgaaatcacacatcacaaaggattttcacagatagctttttctagtttttatcataggatattgggtttttgactataggcttcagtggactcttaattgtaccttcttaaatgctacaataaagtattttcaacttgctggatcaaaacaaaggtttgactttgtgagacgaatcctcacatcgcaaagcattttcacccatagcttgtttctagtttttaccgagagatattattttttcactagaggcctcaatgggctcctaattgtccccttgtagattctacaaacaaagagtctaacctgctgaagcaaaacaaagtttaactttgtaagatagacctacacatcacaaagcattttcacagataggttgtttttagtttttatcaagggatatttgatttttcactgtaggtctcaatgggctatgaaatgtcccctctagatccacaaaaaaaagtttccaacctgttgaatcaaaagaaaagttcaacttgtgaaatgaaatcacacatcataaagtattttcagagatagcttctttatagtttctatcactggatatttggtttttcactatagacctcaatgaacttcaaaatgtctctttgtagattctacaacaagagtgtatccaacctgcagaataaaagcaaaggtttaactctgtgagatgaatccacacatcacaaagcattttcagagataattttttttattgtttttatcgcaaaatactcacttttttactataggcttttataggtgtgaaacatccctttgtatattctacaaaaaggtattccaaacttgctgaataaatgcagaggtttaaatttgtgacatgaatccacatattgcacagcatttttactgacagcttttttctagtttttatcacgggataatcagtttttcagtataggcctcaatttggtccgaatagtaccctagtagattgtagaaaaagagggtttccaacctgctgaattacaagaaaggttaaactctgtgagataaaatcacacattgtaaagaatttttagacatagcttctttgtagtttttattacaggacatttgattttttactataggcctcaatgagctctgatatttcccctggtagattgtacaaaaagagcatatccaatctgctgaatcaaaacaaacatttaactctgtaagacaaatctacatatcgccatgcattttcacagatagcttgcctctagtttttatcacgggatatttgatttttcactataggcctcaatgggctccaaaatgttgcttcatagattctacaaaaagagtgtttccaacctgctgaatcaaaagaaaggtttaactttttgagataaatacacgcattgcaaaacatttttacaggtagttcattttagtttttatcatgggatattccatttctcactataggaatgaatgggctctgaaatgtcacttcaaagattctacaaagagagtgtttccaacctgctgaatcaaaacaaacatttaacttgttgagatgaatcctcacatcactaagcattttcacagatagattgtttttagttttatcatgggatattcagtttttgattataggcctcaaagactgaattgtggccaagcagatagtaaaacatatgtgtctccaaccttctgaataaaaatcaaaatttaactatgtgagatacatccatatatcacaaagcatatttacagatagccagtttctagttttaatcatgggatattcagtttttcactacaggccttaatgggctcaaaaaagactcctcttattctactaaatatttgcttccaatgtactgtataataacaaatattaaacgctgtgaaagaaatccacagatcacaatgctttttcacaaatagcttgtttctagtttttatcacaggatatttggtttttcactgtaggcctcaatgggctatgaaatgttcctttgtagattctataaaaagtgtgtttccaacttgctgacttaaaataaaggttttacactgtgagatgaatccacacattgcaaagcattttcacagatagcttgtttctttttcttatcatgggatattcagtatttaactagagacttcaatgggctctggaatgtcccatagtaaactctatacaaagagtgtttccaactggctgaataaaaacaaaggtttacgtctgtgaggtgaatccacacaacacaaagcattttcactgacagcttgtttctagttttatagcaggattttttttcaatattggtctcaatgggctccaaaatgtccctttgtagattctacaaaatttttttccaacatactgaatcaaaacaaatgtttaacactgtgagatgaattttcacatcaaaaagcatttttacagtagtttgtattagtttttattatgaaattttgaatttttcactgctagcctcaaaattgtcccctattagattctactaaaagaatatttccaacctactgtatagaaacaaaagtttaactctgtgaaatgaatccacacattgcaaacctacttcacagatagcttgtgtctagtttttatcaagaattatttggcttttcactataggcctcaatgggctccaaaatgtcccttcatatattttgctaaaagagtgtttccaacctagctgaatcaaaagaaagtttaaactctatgaggtgaaactgcaaattgcaaagcattttcacatatagcttctatagtttctatcatggaatattcagtttttcactatcggcctccatgggctatgaaatgtcccctcgtaggttctacaaaaaaagtgtttctaacatgttgcatgaaaacaaagatttaactttgggagatgaacccacacattgcaaagcatttctatagaaagattttttctagtttttatcacaggatattagatttcatactgtaggcctcattttgctccaaatttaccccttgtcaattctacaaagagaatatttccaacctgctgattcaaaacaaatgttcaattctgtgagatgacatgcaaagcttttcacagatagcctgtttctagttttcatcataggacatttggtttttcactataagcatcaaagggctctgaaatgtccctttgtagattctacaaaaagagtgttcccaacctgatgaatcgaaagaaaattttaactttgtaagatgaatccacacatcacaaagcattttcactcatagcttgtttctagtttttatcgtgggttattggttttcactaaatgcctcaatgagctatgaacagtcccttgtagattctacaaagaaagaatttccaatctgctgaagcaaaacaaagttttaactttgtaagatgaatctacacatcacaaagcatttttacaaaaggttgtttttagtttttatcaagagatattctatttttcacagtacacctcaatgtgctacaaaatgtcccctagtagattctacaaaaaaactttctaaactgctgaatcaaaagaaaagttcaactggtgagatgaaatcacacatcacaaagtattttcagagatagcttctttatagtttttatcatgggatattagatttttcaatataagcctcaatgagctctgaaatatccctttgtagattctacaaaaaaagtgtttccaacctgcaaaataaaaaggaaggtttaattctgtgagataaatccacacattgcaaatcatcttcacagttggcttgtttctaatttttattgtggaatatttggcttttcactgaaattctcaagtgctctgaaatgtccctttgtagattctataacaagagtgttttcaaactgctgaatgaaaacaaaggtataacgctttaagaggaatccacacatcacaaagcatatattcagatatcttgtttctagtttttaaagcatgatatttggtttttcactataaccctcaatgggctcagaaatgtctcatagtagattttacaaaaacagtatttcctacctgctaaatcaaagcaacagcttaaatctgtgagattaatccaaacctcgcaaagcattttcacagatagcttactcctagtttttatcgcaggatatttggattttcagtataggcttcaatgggctctgaaatgtccattcataagttatataaaaagtatgttcccaaacccctgaaaaaaaaatgaaggtttaactctatgagatgaatccacacgatgcaaagcattttcacagatagcttgtttctagcttttatgatgagacattcgaatttttactattggcctcaatggggtcagaaatgtctttttgtagattctacaaaaaaaaaaggcttttatttttctgaatcaaaataaaggtttaactcttctatatgaaatcacacatctcaaagtattttcacagataacttgtttctagtgtttatcactggatattgggtttttcactataggcttcagtggactcttaattgtaacttcttaattcttcaaaaagtgtgtttccaacctgctgtatgtaagtaagtgtttacctctgtgagacaaatcttcacattgcaaagcattttccccaatagcttgtttgtagttttaattgcataatatttggttttgtactataatcctcaatgggcaccgaagtgtcccttcgtagattatatgaaaacagtgtttctaacctgttgaatcaaaacaaaggtttaactgtcagatgaatctacacattgcaaagcattttcacaggtagcttgtttcaagttttcatcgcaggatatacgtttcttcattataggccccaagagctccaaaatgtcttagagtatttcaaacctgcagcataaaaacaaaggtttaactttgagacaaatgcatacatcacaaagaattttcacagaaagcttgtttctagtttttatcaggagatactcagtttttcactatagacctcaaggggctttgaaacatcccttcatagattacacaaaaagattgtttccaccttgctgaaacaaacaaacaaaaaattaactctttgagatgaatcaacacattgcaaatctattcacagatagcttgtttctagtttttttttttttttttttgaagggtattctgtttttcactataggcaccaataggctcctaaatgtccctccgtagattctacaaaaagagtgtttccaacctgctgaaccaaaagaaaggtttaattctatgagatgaaatcatgcacaagaaagcatttttttgagataccttttttatagtttttatcactggatattctatttttcacagtaagcctcaatgggctttgaaatatctctttgtcgattgtaccaaaggagagtttccaatttcctgaatcaaaacaaaggtttaatgttgtgagataaatccacaaattgcaaaacattttgacagaaaacttgtttctagtttttatcacaggatatttggttttcattataggcctcagtgggctaagaaatgtcccctcatcaaatctacaaaataggtttctccaacctgctgaatcaaaattaacattcaactctgtgaaatgaatccacacatcacaaagcctttttttttttgatggaatctcactctatgacccacgctgccgtacagtggtgtgacctcagctcacagcaacctccacctcctgggttcaagcaattctcctgcctcagcctcctgagtagataggagtacaggcacacaccaccatgcccagctatttttttttttgtatttttagtagagacagggtttcaaaatgttggccaggctgctcttgaactcctgactgcaggtaatccaccagcctcagccttccaaagtgctgggattacaggtgtgagccactgcacccagccacaaaacattttcacagatagctagtttctagtttttatcaccagatattcagtttttcactattgtccacagtgggctttgaaatgtccccttgtagattctacaaaaatagtgtttttgacctgccaagtcaaaacaaatgataaactctgtgagatgaaactacacatttcaaaacatttttacagatagcgtattctagtttttaatcatgatatattcactttttcactctaggccccaatgggcttggaaatgttttttcattgattctacaaaaaaaaattgtttccaactttttaaatcaaaacaaatatttaactctgtgagatgaattcacaaatcacaaaatattttcacagataatatgtttctagtttttatcaagggttgttcttttttttattgtaggcctcagtgggctctgaaatgtccccttatagattttataagaaaagtttctccaagctgctgaatcagaagaaaagttaactctatgagataaaatcacacatcacaaagcattttcagagatagttttttaaatagtttttatcattaaatattcattttttcagtatttgcctccatgggctctgaaaagtactatcaaagagtaaacaaaattagtgtttccaacatacttagtcaaaacaaaggtttaactctgtgagatgaatccacacattgcaaagcattttaacagatagcttgtttctaatatgtatcatgggatattcagtttttcaatataagcctcaaagggttctgaaatggaacttcttagattctacaaagagactgttttcaacctcctgaataaaaacaaagatttaactccatgagatgaatccacacatctcaaagcattttcacaaatagattttatctactttttatcatggaatattgggtttttcacaataggcttcaatggactctatatcatcccctattaaattctacaaaatgagtgtttccaacatgctgtatataaacagaggttaactctttgagatgaatctatatacacaaagcatttgcacagagaacatgtttctagttttcgtagtgaaatattcagttttcagtctataagacctcaatgggctctgaaatgtcccttcatagattgtacaaaagtgggtttccaaactgcagaatcaaaacaaaggtttaactctgtgagatgaatccacacaacacaaagcattttcactaataatttgttgctagtttctatcatgggatatttggtttgtcaatatgctcatccatggaaaccaaaatgttcctttgtagattcttaaaaaaaaagtgtttccaatctgctgaatcaaagcaaatgtttaactctgagagatgatccacacatcacaaagcattttcacagaaatcttgattctcatttttatcagggaatatttagtttttcaccataggcctcaatgggctttgaaatgtcccctcttagacaaaaaaaaaaaaaaaaaaaaaaagtgtttccaacctttgaattacaactaaggtttaactctatgagatgaatccacacattacaaagcattttcacagatagcttgtttctagtttttatagagggatatccagtttttcactatatgcctcaatgggtttaaaaatgacccttcatagattccacaaaaagagtgtttccaaactgttgaatcaaaacaaagttttaactctgtaaaatgaatgaacatatcacaaagcatttttgtagatagcttgtttctagtttttatcacaggatattctggttttcactacaggcctcaaagagctccaagatgtcccttcatagattctacaaaaagagtgtttccaacctcctcaatctaaagaaaaatttaactcattgagatgcccacattgcaaagcattttcacacacagctcctttctagtttttttgctggatatgcggttttttcactataggcctaaacaggctccaaagtgtcccttttagattctacaataacagttttttctacctactaaatcaaaacaaaggtttaactctgtgagatgaacccacacatcgcaaagcatgtttacagatagcttgtttccagtttttatcatgggatgttggatttttcactgtagacctcaatgggctctgaaatgtccccttgtagatcctacaaaaagagtgtttcctacctatgaaatcaaaacaaaggtttacctctgtaaaatgaatgcaaactgcacaaattattttcacagatagcttgtttctagttttaatcacgagatattcactcttacaccataggcctcaatcagcttagaaatgttgccttgtagattctacaaaagagtgttttcaacctgctgaatgaaagcaaaggtttaactctgtaaaatgaatgaacacattgcaaagcattttcacatagagtttgtttctattttttttttgtgggatattttgttttccactctaggcctcaataggctctgaaatgtcccttcacagattctacaaaaagagcatttctaacctgctgaataaaaacaaagatttaactctgtaaaattaatccacacatcagcaagtattttcacggatagcttgtttctagcttgaatcacgaaatattaggttttttattatagacctcaatgggctccaaaaaggccctttgttcattccacaaaaaaaagcatttccaacctgttgaatcaaaacaaaggtttaactccatgagatgaatccacacattgccaatcaagttcacacatagattgtttttagtttttattgtgaaatattcaattttttactgtaggcttcaatgatctccaaaatgtattttttgtgtattctacaaaatgattgccccaactttcttagtgaaaataaagtttaactctctcagataaatccacacattgcaaagcattttcacaaataaatagttgttagtttctatcataggatatttggtttatcaatatatatgcacatgggctccaaaatatccctttgtcaatgcttcaaaaagggtgttcttaaactgctgaatcaaaacaaagttttaattctgagacccacatattagaaagcattttcacagatagcttgattctagtttttatagggaatattcagtttttcaccataggcctcgacgggctccaaaatgtccctttgtagattctacaaaaaaaaagtgttcccagcctgttgaatcaaaaccaaagtttaactttgtgagatgaatccacacatcacaaagcattttcacagatagcttatttctagttttcattgcaggatattcagtttctcaatatagtcctccttgggctctgaaatgttgcttcatggattctaaaaatatagtgtttccaacctgctgattcaaagcaaaggtataattctgtgagagaaatccacacatcacaaagcattttcaaagacagcttgtttctagtttttaacatgggatattcagtttttcagtataggcctcaatttgctccaaaatgtcttttcgtagattcaagaaaaagagtgtttccaacctgctaaatcaaaagaaaggtttgactctgtgagataaaatcacacattacagagcattttcagacatagcttttttatagtttttattatgggacatttggttttttactatatgcctcaatgggctccaaaatatcccctcatagactgtacaaaagagcatttccaacttactgaatcaaaatgaaggtttaactctgtgagatgaatttactcatggcaaaaaattttcacagatagcttgctttgtgtttttatcacaggatattccgtttttctccataagcctcaatgggctccaaaatattcctttgtagattttacaaaaaaagtgtttcaaaactactgaatcaaaaccaaagtttaactctgtgagatgaatccacacatcgcaaatcattttcataaatagcttttttctagtctttattgtgggacatttgattttttgccataaacctcaatggattctgaaatattgttttgtagattctataaaatgagtatttccaacctgctgaatcagaagaaaggtttaacactgtgagatgactccacacatcacaaagcattttcacagatacattgcttctagtttttcttgtgagatattcggttttcactataggcctcaaatggctctgaaatgtccctgcttagattctacaaaaaaaaagtgtttccaacctgctgaatcaaaacaaagttttaactctttgagataaatccacacattgcaaagcattttcacagatagatgtttctagtttttatcgtgggatattgatttttcactacatgccaaaatgggctccaaattgtccccttgtagaatctacaggcagggcattttcaacgtgctgatgcaaaacaaagttttaactgtgtgggatgaatctacacatcacaaagcatttttacagataccttgtttctagtttttatcacagtatatttggtttatcactatatgcctcagtttgctctgaaatgtcctatcatatattctacaaaaagagtgtttttttgtttgtttgtttgtttgttttgttttgttttgtttcatttttgagaatgagtctcgctcttttttgcccaggctggagtgcagtggtgtgatcttggctcactgcaagctccacctcccgggttcatgccattctcctgcctcagcctcctgagtagctgggactacagatgcctgccaccacacctggctaattttttgtatatttagtagagacagggttttcaccatgttggccaggatggtcttgatctcttgacttcgtgatccaccagcctcggcctcccagagtgctgggattacaggcatgagccaccatgcccagccaaaaagagtgtttttaacctgctgaatcaaaagaaaggtttaactctgtgaggtgaaattacacattgcaaagcattttcagagataacttctttattgtttttatagtgggatattaggtttttcactataagcctcaataggctttgaaatatctcccagttgattgtaaaaaaaagagagtttccaaactgctgaatcaaaacaaaagtttaacgtcatgagataaagccacaaattgcaaagaattttcacagataacttctttctggtttttatcacaggatattcagtctttcactatagtcctcagctgactgagaaatgtaccctcataggttctacaaaaagagtgtttccaacctgctgagtcaaaacaaaagttaaaatctgtgagatgaaatcacatattgcagaacatttttacagagagcttgttctagtttttagcatggcatattcggtttttcactataggcctcaataagctctgaaatgtcccttcatagattctacaaaaagagggtttccaacctgctaaatgaaaagaatagtttaactctgtgacatgaatccacacattgaaaaacattttcacacatagcttgtttctagtttttatcacgggatatccagtttttttagtacaggccactgtgagctccaaaatttacttctgtagatgctacaaaaagagtgtttccaaccttctgaatcaaaacagaggtttaactttgtgagatgaatccacaaatcttaaagcattttcacagataatgtttttttcagtttttattggggatatttggttttacatgataggcctcaaaggactcagaaatttcttcttttagattctactaacagagtgttgccaacctgctgtatataaacataggtttaactctgtgagataaagccacacatcacaaacattttcacagttagcttgtttctagtttttatcaaaagatatttggtttttcactataggttctaatgggctctgaaatgtctcctcatagattatacatcagtttacaaactgctgaatcaaaaacaaaaaagggtttacctctgtggaataaatccaaacatttcaaagataattcacaggcagcttgtttctagactttaccatggcatattggtttttcactataggcctcaacaggctcggaaatgttttttggttgattctacaaaaaaagtgtttccaaccttttgaatcaaaacaaagtttaaactctgtgagatgaattcacacatctcagtgtgttttcacagatagcttgtttgtagtttttgtcaagggatattcatttatttattgtcacactcactgagctctgaagtatcccctcatagattccacaaggaaagtgtttacaaactgctgaatcagaagaaaagtttaactctgtgagatgaaatcacatgtcataaagcattttcagagatagcttctttatagtttttatcaagatatattcagtttttcagaattggcctcaaggggctccaaaatgtcctctcgtagagtctacaaaattagtgtttccagactattgaatcagaacaagggtttaactctgtaagaaaaatccacacattgcaaagcattttcacagatagcttgattctagtttttatcagggaatatttggttattcaccataggactcaatgggctttgaaatgtctcttcttagattctacaaaaaaagtgcttccaaccttctgaattaaaagtaaggtttaactctatgagatgaatttgcacatcacaaagcattttcacagatagcttgtttctagtttttatcatgggatatctggtttttactataggcctcaatgggcttcaaaatgatccttcatagattctactaaaagagtgtttccaacctgtttaatagaaacaaatgtttaattatgtgagatgattccacacatggtgaagcattttaccacacagcttgtttctagtttttattggttttttactataggccttcatgggctccgaaatgtcccttggtggattctacaaaaagagtatttaccgtctgctgaatcaaaacaaggctttaactctgtgagatgaatccacacatggcaaagtgtttttacagatagtttgttttcagtttttattgggaaatatttggtttttcttaataggcctcaaagggctcagaaatgtcttttttctaattctactaaaagagtgtttccaacctctgtatataaacataggtttaactctgtgagataaatccatacattgcaaagctaattcacagatagcttgtttctaatttttatcaccagatattggtttttcaatataatctttgagatcaactcacacattgcaaagcattttcacagatagctttttttagtttttatcaagggatattcactttttattgtaggactcaataggctctgaaatgccctttcatagattctacaaaagaaattgtttccaacctgctgaatcaagaaaagttaaactccgtgggatgaaatcacacatcacaaagcattttcagagatagttttattatagtttacaccacaaaatatttggtttttcagggttggcctcaacaaaattttaactctgtgagatgaatccacacatcacagagcatttttcacaaatagcttttttctggtttttatcgtgggataactggtttttcaatataaacatcaatgggcttcaaaatattcctccttagattttactaagagactattatcaacttcctaaatacaaacaatggttaaatcagtaagatgaatccacacattacaaagcattttcacagataaactttttttactttttctcacagaatattgcattttttcactataggcctcaatggactctaaattgccctctctcacattttacaaaaacagtgtttccaacctactgtatataaacaaaggtttacctgtctgagtagaatctacacacgcaaagcattttcctagataacgttttcagttttcattgtgaaacaatcagtgtttcactataggtctcaatgggttccaaaatgtcccttcgtagattctacaaataaggtgtttccaacctgctgaaacaaaactaaggtttaacactgagagatgaatccacacattgcaaagcatcttcacagatagcttatttctagtttttatcatggaatatttggttttacactataggactcaaagccctcagaaatttattcttttagattcaagtaaaagagtttttcatacctgcagtataaaaacaaaggtttacttctgtgggataaactcacacattgccaagcatattcacagatagcttgtttctagtttttatcacaggatgtttagtttttcactaaggctcaatgggctttgaaacattcctctgtagagtgtacaaatttgacctgctgaatcaaaacaacgtttaactttttgagatgaatccacacatcacaaagcattttcacagaggcttgtttctagtttttattgcaggatattggtttttctctacaggtcaatattgtctttgaattgtcccctcatagattctacaaacaccgagcttccaagccaatgaagcaaaagaaagtttaactttgtaagatgaatctacatattgcaaagcatttttaaaagatagcttgtttttagcttttattgctggatattcagtttttcactgtaggcctcaatttgctctgaaatgttttattgaagatctacacaaagagtgtttccaaccactgaatcaaaagaaacgtttaactctgtgagattaaatcacacattgcaaagcattttgagagacagcttcatatagatttatcatgggatatttggtttttcactgtaagcctcaataagctttaaaatgtctcttcatagattgcacaaaaaaagagtttccaacctgctgaaaaaaaaagttttaacgttgtgagatgaatccacctattgcaaagcgttttcacaaatatcattttttctagttttcatcgtggaatattgtttttaagtgtaagcctcagtgggctcaaaaatacccctcatagattctacaaaaagagtttttctaacctgctgaatcaaagcaatagttcaactctttgagttgaatccacacatcacaaagcaatttcacagatagcttgtttccagtttttatcacgagatatttggttttttactgtaggcctcactagctcagaatttttccctcttagattctactaaaacagtgtttccaaaatgccatataaaaataaagttttaactctgtgtgatgaatctacacattgcaaaccattttcagacatagattatttctagtttttatcatgagatattctgtttttcactataggcctcaaaggtctccgaaatgtccctttgcagattctacaaaatgagggttttcaacctgctgaatataaagagaggtttaattctgtgagataaatccacacatcacaaaacattttcactgatagtttttttcaagttttttatcgtgtgatatttgatttttcactataggcccaatgggatccaaaatttctctttgtagattctataaaaaagtattttcaacctgccaaatcaaaacaaggttttaactgcatgagatagatctacacatcataaagcattttcacaaattgtttgttctagtttttatacggggatattttgttttttactataggccacagagagctcagaaatgtcttcttttagattctgcaagaagaatgttttccacctgctgtatataaatataggcttaactctaggagaaacatctgcacatcacaaacattttcacagatagcttgtttctagtttttatcacgggatatttggtttctcactagaggcctcaataggcccctaagtgtccctttgtagattctaaaaaaaagtttccaatttgctgcataaaaacaaaggtttaactctgtgagatgtgtgcacacatcataaagcattttctcagaaggattatttttagttttttcatgagatactctgtttttcatttgaggccacattgagatctgaaaaatccctatgtagattctacaaaaagagtgtttccagcctgcagaatcaaaccaaggtttaattctgagagatcattccaaacatcatgagacacttttacagataggttgtttctaggtttaattgtgggatattcagttttttaatataggcctcaaagggctctgaaatgtcccttcatagattctatgaaaagagtgtttccaactggctgaatcaaaacaaatgtataactctgtgagagaaatccacacatcacaaagcattttcactgacagcttgtttcaagtttttattgcaggataatcagtttttgactataggcctcaatgggctttaaaatgtaccttcatggtttctacaagaagagtgcttcaaacctgcttactcaaagcaaaggtttaattctgtgagatgaatccacacatcacaaagcattttcacgtatagcatgtttctagtattgatcactggatatttggtttggtttttcactgcagacctcaataggctctcaaatatccccctcatagattctacaaaaagaaagtgctttcaacctgctgaatcaaaacaaagttttaactttgtgacatgaaatgacacatcataaagaattttcacagatagcttggttatggtttttatcgtgtgtattcatttttccactacaggccacagtgggctccaaaatgtccactcaggcctacaaaaagagagatttttgcctgctgaatcaaaacaagggtttagctctgtgaggtgaatccacacatctcaaagaattttcacaaataccttgtttccagttttcgtcacaggatgttggtttttttcatatgcttcttcatgggatctgaaatgtcccttcatagattctataaaaagaatatttccaaccagctgaatcaaaacaaaagcttaactctgtgagttgaatccacacatcacaaagcattgtcatatatagcttgtttcaagtttttatcttgagatataaggtttttaactgtagggcccaatgttctctgaatgtgccttcttagattctacaaaaagagtgtttccgacctgttgaatcaagatagaggtttaactctgtgacatgaattgacacattgcaaagcgttttcacagatagcttttttctagtttttgtcactggatattcagtttttcactattggccttagtggattcccaaatttcctttcatagattctacaaaaagagtgtttccaatctgctgacaaaacagagctttaaatctgtgagatgtatccacacattgcaaagcatttttacaaatagcttgtttctagtttttatcacaggatatttggttttccactatagacctcaataggttcccaaatgtccccttgtagattgtacaaaaggagtgctttccatgtgctgaatcaaaacaaaggttttactccatgagatgaatccacacattggaaagcatttccacagatagcttgtttctcatttttattgtgaaatatttggtttttcactgtaggccttaatgtgcaccaaaatatcttctcgtaggttctacaaacagactgttcccaacctgcttaatcaaaacaaaggtttaactccgtgatatgaattaacacattctaaagcattttcacagatagcctgtttctagtttttatttccacttttttttcactattggcttcaatatgctttaaaatgtttcttcatagattctacaaaaagagttttccaaactgctggattaaaacaaaggtttaactttgtgagataaattcacacatcacaaaacatttttgcagatagcttgtttctagtttttatcatgggatatttggtctttcactgtaggcctaaatgggcttcaaaatggcctttagtagattctacaaagagagaatttccaatctgctgaatgaaaaagaatgtttaactctgtgagattaatccacacaatgcaaaacattttcagaggtagcttgtctttagtttttattgcaggatatcggtgtttcaatgtacttgtttatgggctccaaaatgtcccattgtatattctacaaaaagagtgtttccaatctgctgaataaaaacaaaggtttaactctgagagatgattccacacatcacagtacctttttacacatagcctgtttctagttttcattgcaggatatttagcttttcactataggcctcaatgagctttgtaatgtcctttcatataatctacaaaaagaggatttccagccttctgaatcaaaacaaacatttaactctgtgagatggatccacacatcccaaagcattttcatagatagcttgtttctactatttatcaaaggatattcgctttttctatttacttctccatgggctccaaaatgtcccttcatagattccacaaaaagagcatttcctaaatgctaaatcaaaacaaaggtttacctctgtgagttgaatccacacatttcaaagcattatcacagatagcttgtttctcatttttaatgcggatattcagtttttactataggcctcaatgtgcaccaaaatgtcttgttgtagattctgcagactgtttacaacctgcttaatcaaaacaaagttttaattctgtaatatgaatccacacatcacaaagtattttgacggatagcttgtttctagtttttatctccacatattttgtttttcactgcaagcttcaatgggctttgaaatgtttctttgtagattctacaaaaagagattttttttaacctactgaattaaaacaaaggtttaactctgtgagatgaatccacacatcatgaagcattttcacagatagcttgcttctagtttttatcgcaggatatttgttctttcactgtaggcctaaatgggctccaaaatggcctttagttgattctacagagagagtgtttccaacctgctgaatcgaaataaatatttcactctgtgagatgaatccacacaatgcaaagcattttcagaggtagcttgtttttagtttttattgcaggatattatattcagtgtttcaatatactcatttatgggttctgaaatgtcccttcatatattccacaaaaagtgtttccaacctgctgaataaaagcaaatgtttaactctgagagatgattccacacatcacaatatcttttgatcgatagcctgcttctagtttcatcacgggatattcagcttttcaccataggcctaaataagatttgtaatgtcttttcatagaatctacaaatagagttcttccagcctgctgaatcaaaacaaacatttaactctttgagatggacccacaaatcccaaagcattttcatagatagcttgttcctactgtttatcaaagaatattcactttttccatttatttctctatgggctctgaaatgtccctttatagattctacagaaagagtgtttcctattggctaaatcaaaacaaagttttacctctatgagttgaatccacacatcacaaaggattttcacagataatttgtttctcatttttgatatgggatattcagtttttactataggcctcaatgtgcaccaaaatgtcctgtagattctacaaacagactgtttacaacttgcttaatcaaaacaaagttttaattctgtgatatgaatccatacattgcaaagcattttgacagcttgtttctagtttttatctccacatattttgtttttcactacaggcttcaataggcttttaaatatttatttgtagattatacaaaaagagtttttttaacctgctgactgaaaaaaaggtttaactctgtgagatgaatccacacaatgcaaagcattttcatagatagcttgtttttagttttcatggcaggatatttggtcttttactgtaggcctcaatgggctctgatatggcccttagcagattctacaaaaagagtgtttccaacctgctgaatcaaaataagtgtttaagtctgtaagatgaatccacacaacaaaaagaatttttacagatagcttctttgtagtttttattgcaagatattcaatgtttcaatatactcatccatgggctccaaaatgtttcttggtatattctacaaaaagaacgtttccaacctgctgaataaaaacaaagatttagctatgagagattattccacacatcacaagaccttttgacagatagcttgtttctagttttcatcatagatagtcaacttttcactacaggcctcaattaactttggaatatcctttcatagaatctacaaaaagagtgtttccagcctgcaaacaagggttaaccctgtgagatggatccacacatcccaaaccattttcacaaatagcttgtttctccttttcatcaaaggatatttgctttttccatatacttctccatgggctctgaaatatcacttcacagattctacaaaaagagtttccaacctgctgaatcaaaacaaaggtttaactctgtgaaatgaatccacacatttcaaagcattttcacagatagcttttctctattttacgttgcgggatatttgattttttgctatactcgtccacgggctccaaaatgtccttttgtagatactacaaaaagagtctttttaatctgctcaatcaaaacaaatgtttaactctgggagatgaatctctgcatggcaaagcatttttatagatagcttgtttctagttttccttgtgggatattcagtttttcactgtaggcctcaatgggttctgaaatgtcactctgtagacaaagggacaaacagagtgattccgtcctgctgaatcaaaacaaaggtttacctttttgtgatgaatccacacatcgcaaagcattttcacagtttctttctagtttttatcgtgggatattcagtgttttactcttggccttaatggactctgacatgtcccttcatagattctataaaaagagtgtttccaacctgctaaatcaaaacaaatgtttaactctgtgggaagtattgacacatcacaaagcaatttcacagatagcttgtttctagtttttattgtgggatatttggtttttcaccgtagaccaaaattggctccaaaatgtacccttgcagattctacaagaagagtgtttccaactgctgaatcaagacaaaggattaactctgtgagataaatatacacatggcaaagagtttttagtgataggttgtttctagtttctttagtgggatattcaatttttcactgtaggcctcaatggcctctgaaatgtcccacagagatggtacaaaaagactgtttccaatgtgctgaataaatacaaaggtttaactctatcagatgaatccaaacatcacaaagcattttcacaggtagcttttttctagtttttattgtgggatgtttggtttttcactattggccctaatgggctccaaaatatcctttcttagattctacaaagagactgtctacaacctgcttaattaaaacaaagatttaactctttgagatgaatccacacatcataaaacattttcagagatagaatttttgttatttttattgcaaaatattcggttttttactataggcatcaatgggtatgaaatgtcctttgtatattctatttaaaaaagtttttttttaacctgttgaataaatacaaaggtttaactctgtgagatgaatccacatattgcaaagcattttcaaagatagattgtttctactttttattgcaggataatcagtgtttcactatgggcctcaatgggcttcaaaatatccctttgtagattttacaaaaagatattttccaatctgctgaatcaagacaaaggattcaatctatgagatgaatccacacattgcaaaaaatttttacttagaggctgtttctagtttttatcatgggataatgggttgttcatcaacgtgctgaatcacaaaaaggtgtaactctgtgagatggaatcacacattgcaaataattttcagacacagttatttgttattgctataatgggatgttcaacttttctctgtaggcttcaacaggcttctaaaactcttttcatagattgtacagaaagggtgtatccaaagagctgaatcaaaacaaaggtttaattctgtgagataaatccacacatcacaaggtattttcacatatagcttgtttttagtttttattgtgtgatgttcggtttgtcaatgggctctgaaatgtttctttgttgaatctacgaaaggaaagttttcaatctgctgaatcagaaaaaaggtttaactctgtgaaatgaatccacacaatgtaaaacattttcacagatggcttgtttctagtttttaccatgggatattcggtttttcactacaggtctcaatgacctccaaagtgtcccttcttagatcctccaaaaaaattgtttccaacctgctgaataataacaaaggtttaactctgtgagctgaatccacacatggcaaagcgtattcagagatatattttttattgtttctattacaaaatattggtttattactataagcatcaatgggtgtgaaatgtccctttgtatactctataaaacaagtgttcacaatctgctgagtaaaagagaggtttagctctgtgagatgaaatcacacattgcaaagcattttcagacatagtttctttttagtttttattgatgaacattcgttttttcactatacttctcaatgggtctatgtacctttgtagactgtacaaaaagagtgtatccaacttgcagaatcacagcaaaggtttaactctgtcagataaatccaaatatcacaaagtgttctcacagatcacttgcttctagtttttatcatgagatattctgtttttcactataggcctcaatgggctctgaaacatgttttcctagattctacaaaaaaaagtgttaacaatctgctgaatcagaagaaaggtttaacactgtgagatgaatccgcagattgcaaagcattttcacaaaaagctttcttttagtttttttattgaaaatattcagtttttcactataggcctcaatgggcttccaaataacttttctgaaattctacaaaaaaagtgtttccaacctgctgaatgaaaacaaaggtttaactctgtgagatgaatccacacattgcaaagcatttttacaaatagggtttctagtttttatcgtgggataatcaatttttcactataggccttaatgaactacgaaaaggctcttcatagtttccacagttaaagtgtttgcaacctgttgaaacaaaacaaaggtttaactctgtgagatagatccacacattgcaaaacattttcactgatagcttgtttctagtttctatcacaggatacacagtttttcactatatgcctcaatgggcttaaaaaagttccttcgcagattctacagaaagagtttttccaacctactaaaaaaaaaaaagtttaactctgtgagatgaattcacacatagcaaagtgttttcactgattgcttgtttctactttatatcgtgaaatatttggttttttagtataggcctcaatgggctctgaaactttccttttcagattctacaaaaagagtgtttttaacttattcaatctaaagaaagttttacctttgtaagatgaatccaaacatcacaaagcatattcacagatagcaagcttttagtttttatcacagaatattttgtttttcactatatgcctcaatgggttccacaaaatttattagtagattctacaaaaggagtgtttccaacctgatgaatcaaaaaaaaggtttaattctttcagatgagcccacaaatccgaaagcattttcacagatagcttgtttctagtttttaccatgggatatttgttatttcactataggactgcatggactccgaaatgtctcctcgtagatcctacagaaagagtgtttccaaactactgaattaaaacaaatgtttaaatgtgtgacataatttcacatatcacaaagcattttcacagacagcttgtttgtagtttttatcacaggattttcagtttttcactataggcctcaatgtgctttgaaatgtctcttcttagattctgcaaaaaacatgcttccaacctgctgaatcaaaacaaaggtttactctgtgagataaatacacacattctaaagccttttgacagacagcttgcatgaagtttttatcaggggatattatgtttttctcaatgggtatcaaagggctgccaaatgtcccttcacagattctacaaaaaaagtcttaaaaactgctgaatcagaacaaagatttagcttcataagatgaatccagaaatcgcaaatcatttcactgaaggcttgtttctagtttttatcacaagataatcagttttttactataggcctcaatttgctcaaaaatgttccctcgtagattctagaaagaaagtgtttctgacctgctgaatctcaggaaaggctaactctgtgagatgagatcagacatcagaaagcattttcatacatagcttctttgtagtttttatcccaggatattcagtttttcactatatgcctcaaaaaattttgaaatgttccctcatagacagtacaaaattatgagaggacatttcaaatgaggggacatttcaaaagattgtacaaatctatgaggggacattccaaatgaggggacatttcaaaagagtgtatccaaccttctgaatcaaaacaaatgtttaactctatgtaataaatccacacatcacaaagcattttcaccatatcccccaaaaaggaaactcttgttctcctactcctattggagggctgcatgattcctataggatgaaaagcaggcagccatggctggcttttgcctggtaatctaggctctgtttcatttcatctgcacgtcctttctcatagtggagaggctctttcattgggctgttgctgggtgggactgcctctcgccacagttctattggctgccggggatttcagggagcaaaagggacttcgggtaggcaggccatgctccaggttgtgtattatgatctcgttgtggtgcctgaggttgtttgcactttgcaggagacttttgggtcctctgacaggaatccttgaacgttgcttggactccagcacaagtcagctcgttctctcatgcaaaccttgattttcctttgttttcatgggggcggggggggtcaacagtgcccctcaacagcactgctggacacccttttcatgcttgcaatcgccacagacggcctctgagacaatgtctcaacctcctctgcacccgtgagaggccagttcaaggtgtgagaacactgctacgccttggacttgcctttgccgtagttcctgcctttcccagagagcccctgcgaggcccaggatgaagggaggcaatgaggtcaaaggcccggccatctttcgctgacacccgcctctggggtctcaggtatgagttcatcacccaaagacccctcaacaggtcaccagactatattccaatccccatgggacccgattcctgaacgcagcctctttcgggaagggagtcagaagagcagtttccagagaccaactcacactctcgaaatgcctccttctccagcgggacccgaccttggagacggtccgagggggccctaaggtcgagacttttagggtcctgcagtggattatcgtaggcagcctttttcctgataccagaccagctctgcctgtaccattttcctctgtttaagcaggctaacagctctgacagctgggcgcccgagactgcctcgctaaagcgcatgcgctagtctcagggcgccaggcctgagctgtaaattctggctagcgtcacaatgaatgccaccgtcacctagcgacaaatccctgcggcttggcggagacagagaactttgtggaggtgcctaggcggtggactctcgcctgtcttctctgtgggatccacgggatagtcccatgatcctaggagagggcagacgtgagccagcctgaagaaacgccaagcaggagccccaggaataaaccgcaaaatccctaaggatccaaaaggatctgcaggatgcctcaggcctgcctagtcatcgtaggggtaagtctttttgaaacttgccccactgtgatttttagatacagcccacctgtgttcctcagggttgctctctcttaggtggggtttccttcagaaacatgcagcctcagaagctgccggtctgtgtgttctgtgggagtgttacaagtgttggaagtctgcgtgtgtgtgtgtgtgtatgtgcctgtaagtgtagtcgacttaaaggaatgtggctaatgcactgcagcgcttctttttttttgagtctcccaaccttatgttgtcctgtctgtgtggctctgcttggtctgcgcggctcggtgctctttatctttctgtggatcatgaatccgcagtgaattcggaggctggctgagaccggcctgggtcaaaatcacctccactgcaaaaaaaaaaaaaaaaaaaaaaaaaaaaaaagatgttcttctagaaagaacaggagcacaccacacccaagaaaggacatctcccagtgttttaccgtcttgcgtccaagtcagggaaagacactagcagttctgtccgcagggcagaatttacatcgaattcagttcccagccgagcaggtacttcccgtcgtgagggggcactcctccatcatcttcggatttcattcagggacagaaagtgtgagcagcaataaggtcagataggggagaggatacaatctgttgtggggtgaatgaggtcccacacctctacctgcaaaaaaggtgaagacagatgaaggtgcttccagctgcatcccctcagtcccttaattgcacaaccagtacacccatggcccggtgttcaggtgggaaaactccaaggtgcagggaacatttggagtgcaaactgaggccatcctgacaaactcccaatttgggggcttttatacctagagccaaatggaagtgtgatgggttgatgctgggtgggatgtggccaccgcacttgcctcttcttttgctgacttccatgttcctcatcggcctagggtttcctggggctggctcaacgtcttacacactaaatgtttcacagttcacagaggacgatcctcatgggaatccattacatgagtgttttcttctaaacgctgtcacgttttaatgactggcagctgttataattttaaaaccgtaaattcccattacattcaccaacaaggaaactcttgttctcccacttctattgaagggctgcatgattcctataggatgagtagcaggcagccatgtctggcttttgcctggtaatctaggctctgtttcatctcatctgcacgtcctttctcattgtggaggttctttcattgggctgttgctaggtgggactgcctctcgccataaatcttttggctgcgagggatttcaggcagcaaaagggacttcaggtaatcaggctgccctccaggttgtgggtcgtggtctccttttggggctgaggttgtttgcactttgcaggagggttttgggttttctgacaggaagctttgaacattggttggactccagcgcaagtcagctcgttctctcaggcaagccttgatttttgttggctttcatggggggtcaacagtgcccgtccacagcactgctgggcacccttttcaggcttgcaatcaccacagacaacctctgagacaatgtctcaacctcatctgcagccatgagaggccagttcgaagtgtgagaacactgctctaccttggacttgcatttgtcgcggtttctgcctttcccagagatcctctgcgaggcccgggatgaagtaaggcagtgaggccaagggcccggccatcttttgctgacacccgcctctggggtctcagtttagattccatcacccaaagacccctcaacaactcaccagactatattccaatccccatgggacccgattcctgcaaacagcctctttcaggaagggagtcagaagagcagtttccagcaaccaactcacactcttgaaacgcctcctcctccagcgggacccgacaacagagacgacccgagggggccctaaggtcaagacttttagggtcccgcaatgggttatggaaggcagcctttctcccgataccaggccgtctctgcctgtaccattttcttctgcttgggcaggctgacagctctgacagccgggcgccccggtccgcctcgctaatgcgcatgcgctagtttcagggcgccaggcctgagctgtgagctctggctagcatcacaatgaatgccactgttacctaatgacaaatccctgcggcttagctgggaaggagaccaccgtggaggtgcaaaggcggtggactctcgcctgtcttctccgtgggatccacaggatagtccgaggatcctaggagagggcagatgtgagcgagcctgaagaaacgtcaggcagagccccaggagtaaaccgcgaaatccctagggatccaaaaggatctgaaggatgcctcaggcctgtctagtcgttgtaggggtgagtctttttgaaacttgcccactttgatttctaggtatagccccctgttttccgcggggttgctgtctcccaggtggggcttccttcagaatcactcagcctcagaagctgccgggctgtgtgtttctgagggagtgttgcaagtgttggatgtctgcgtgtgtgtgtggctttgtgtatgtgtgtacgtgtgtgtgtgcgcgcctgtaagtggagtcggcttaaagaaatgcggctaactcactacagatttttcccccacctttttgtggcctgtctgtgtggctttgtttgggctgtgggactctgtgtcctttgtgtttccgtggttcctgaatccgcgatgaattgggaggctggctgagacccgccggggtttaagtcacctccctctgcaaagaagccactcatctagaaagaaaaggaccacaccacacccaagaacagacaactcccagtgcttcattatcctgtggccatcccagagaaagaccctagcagtcctgtccacagggctccttgaatttacctcggattgggtttccagccaagcaggtgcctcccatcgtgaggaggacactgctcccttgtattgggattacatttagggatggagagtgtgagcagcaataaggtcaggtaggggagaggatataatctggtgaggtgtggatggggtcctgcaccttcacctgcaaaaaagatgcagacagatgacacagaaggtgcttccaagtccatcctcgcattcccttcattacacaggcagtccacacgtagctcagtgcccagttgggagtactccaacgtgcagggaacagttggagcacaaacttgggccattctggtcagctcccaatttgggctttcattcctgaagccacatgagattgggatggatggatgctgggtgggatgtggcctctgcactggcctcctcttttcctcactttcacttcctttctcagggtcttggcttgttctttagcccaaagggagtggggtggacagattacctctgaaccttgggtgcctttgatttctttctttgtatttgatgtcattacgatgaacattgatgcctgctatgtgccaggactgagtcccggattcccagaggaaggaggcaccattcccctgagcctgctaatgggtcttccatccacccttctcattataaggcagagttcaggttttgagaccaggaaaacgtgaatttgactccactgggtcacctgccagctgctgacagccacttaattcctccaggcccaacatccctgtgtgtaagcacaatacacaattagggttgctgtcagccttatgcaaggggaggcttggaagtgcttggcagcagcaggtggtccacccagactgtctgggtaggcctcggtctgcttccctccaggtctgtgccaccttcactcaggctcctgcagaggcagtctgtcaccttgtgaccaggctagaaaacagcacctggcaggagggcatggggactaggcgggtccctgtctggagcccctgaaagtcggccaggcagcatctctgggatgggtggctggatgccagtgctcttgtcctggcatccctctgtttcctgcataggctcgtggtggcagacttccaggcctctccacattctctgtcctggtgatggtgggagtgtctccccctctgaaaggtgcccctggaggttgggaaatggccatgccctttgaacctcccttctggcccagggtctggctcagacagagtgcacagagtgtgtgttgaggagggtagaggagtggcagccctttacctatgagccagtgctctgcaggtctacccaagggccaacatcccaggggccaggccctaaggtgaacgtggcatcccaggtcccagcatcttctgagaagacatcatcccagtaccagggtccctgttggatagtgcctctgcccatctctcctctggctcccagcaggttcatggttgcagtggcctgtgcaggaggggtgcaggtgatggggccagggacttttgcaggaaggaactaggacattggccaaagaggctgctccctgaccccaattgtgtccctaatttactatgtgacctccacaagtcattcagcatctctggtcctgttcccccccccacaactatgtgatgggcacaacaataccacagtccctgtgactgtgttttattcaggagtcagctgtgggcctccctgacactccatccccaacaaagtccagtgtcaggagttagttggacctccacctcgatcttatattttccagcagcattttgggaaggaatatcctgaaaggtgagcctgcctgttatctcctcagagggttcaggaaaagccggccctctctatccccttttctcaccatgatcctccaggtctgttcacctaatcactaggcatgaactaattgaacatctgccaagacccaggtgagcttttgcatctagagagaactaagacacagccatggtcctgggggtctcaccctcttagatgggaggccagcaggagaggacatgtgggtcgggttcaagagtggagtaggaagttgcgagtggctagtgcccacctgggcatggtctcatgggcccttgccaggaatgtgcatgccatcctgtggcctttgtaaggcttttagcagagaagggagtgggattgagaaaaaaatccccatggccagggctgcaagaatggctaaggtccttggtggtaccatgggcatgtggcaatgaccggaggtttgagaagtagagtaggcagggtctggtggtcgaggggcatctaggggaaatcagaccgagttctagcttcccagtttgcactcatgggcagacagtggtgattttactgaggggagatgacctgaggaagagtaggatggaggaaacaccgggcctgcctgaaggtagatgccagacaaagggaggaaaagagaagcctgagaggaagcagcaggtacagatcaaggaggagaagcacaagagtgctggcccaaagggcaagaagtgtccagaagaagggggctacagaaaggtcaagttagataaaggccatagtacacttatccaatgtggccaccagaaggccagctggtcaagggtgttgctgaaggcagaggacagtgggtcaggagtgaaggtgatgatgtggatcgagagtgtagacaacaggcagaaggggagagagatggtgtggatagagggggtgtagggtcatagatggaaatatccccaagtttaggtggatgggcaggagatcattgctgagaagggatctcataagaaagtagaggtggagcagaacagagggggcaacgatgtgagggtggcagtgacacagggtcattggggagtgtgtggggacacctgtctgttgggcatcggctcatggcttagggcaggctactgggcaagcccacagacccctagaagagaggagctcctgccatgtatggcgcagttttgtcattcaccatgcactctaatttcacatactgagtacttggtatgtactggtcactgtgttggacacgggggacataaaatatggtaagacacagtcccaaaggggctaacagtactgtggcctcttactcaaaggcttgcacccagggttaagcttctaacaagttggaaggcagacataggcacctccatttgccttgagtacaaacagatgttcagagaggtttagtgactggtcaaaggtcacgctgccaggaaatggctgtgtccaggacagttgcaggtctcctgcccataaaacccacccaggccaccaggttcagtttcagccaggtggccttcagggttgaccaccctgttcgactcggcaagaagaatacaagccaaaggcaagcacgtactcattcttctgagcatcctctgtgtgcccatccctgttgtgggcatgggcggcagggaaggagacatgaattccaaatcgtgaccttgccttctgcagctgagggtgtagttggagaatttgatgtcccaggagagggatgtctcctgttccatggctgcctaggagagggcagaaagcaagccctcttgaaggagagagagaggggtaagggggaggtaagcagggacaactcttcccctccctcaaaggaggccactcaggaatcccagggaagccagacaaaagcctgtggaataaaggggcctctgagcctcctccccactgctgccatcctgactcagggatttcagggtgcagtcatcattcccacccccaaaggagaaagcccaggccggtggagcctggctgctgcaacttcttatacaagcagctctggaggccccatatctgagctggcagctccattagagggaggggtgggcattagtatggaatgccagcctagatggatggtcagtgccaggttctggggcataggaaagtccaggatcatgaccaggggtagctgatcaccaggaatgtagttgggactccatgcccgaatgctagggagactcagagctggatctgggccacaaagtgaggggacagtggctgttggtttatattgaggggaaaatggggccgacaggactaaggccctggggctgaagggcatagagctcttgctaaaatttgggaggctctgtttaaaggaaactagtgttgatagaatttccagagctgctgcctgggccaggtaagacccgcaggacccttctgtccaggttaggctcctgtaggtgcctaccctatctcctcaccttctcctagctagaggtcccctatgaggcatgaagctggtggggcagaggcccctgtcagggccttcatgtctgcctgggggctggaccacctggccggaaaaaggaagccgaggtagcagaagggcctgcctgaagatcctctgagtcttcctcctccttttctactccttggcccaggtggttgtataaattactattcacccctataaaaattgtttaactccatcacaaatatttggataatagggggatatctcaatctaattactgttagcattttggtttcttttcatttattctccttcctatgtgtgtgtcttggggagttcccataggggcatcatagagtactgattattgtgcattctgctttttcacttaccgtattcacctagtcagccagtgtcagctgctgtaccaggcactaggaaccaataaaaaagtgtgattcctacactcaggtagcttattgtccaggacagattggccatcaaatccagttaggatgtggtatgcagatatgatatcatatggttatgatatgatatggtacatcttcaaggagctgtgtcagggacatgatggagaaaccactctcccaggatcttgtcagcaagagggaaatccaggagtgcttcccagaggaggaaggtgttgacagaggtgaattctaaaggtttctacagttccttctcatgaaaccgtctggacctggtgcttttttcagtggcagatttttttatcatcagtggtaattaagtttctactcattatctagttcattaggggcactttatattttactaggaaagcattcattttctccaaatgtgtaaactctccacttttaaaatttattatgaatttatttgtggccaaacaaatgatttttctaagattttcatagacgttgaaaaaatgtatattttctatttaagggatataaggtcccatatataccaaatcaagtttttggttattcaagctgtcacttcttttgtatcctttgggggaggaggcttttactgtagttctaacagagatttagccttccactcaaattttctctataaatctcttcttttactagtttttgctttttatatttactatgatgtggggagaatgcagattttgagtgttctttataattttctctataaatctcatcttttactagattttgctttttgtatttactgtgatgctgtcgggagcatgcagatttcgagtgttctctcattatgaattgtgcccatcattacatggtgtccctctttatcccatttcagtgcttaaccttaaattccacccttctattattattatggccactctttattttactttagcttttgcactttcctggtatctcttggcattcttttattttccaccattatcattgtttaagtgtttttcttgtatatatacatcactgggtttttttgttggtggtggtgttgattgagacagggtcttgttctgttgccctggctggagtgcagtggcaacatcacagcttgcttcagcattgacctcctagtttgaggtgatcctcccacctcagcctttacagtagctgggactacaggcatgcaccattacacccagctaattttttggttttttttttttttttttttttttttggagagatggggatctcaccatattgcccagttatcactttatttttaaacccaggctgacctttgtcttttaatgggaattcatctgttcacatttcattaaacaattgatctactgtagttggttttatttcttttggcttattttacatttattggtttaccttgtgggttttttcctctggttattgatcactctggttattaatttcctttttcttcccttgttactctttccatttcattactggcatctaccccttctctggagttcctaatcaaacacatattctttagcatgtgattccatggggattttttttctcagcactgtcatctggagctccaatctgttggtctataagcttaggtctttctttctgcttctgtaaatctatttgttgtttgatttgattgttgtttttgttgttgtttattttctctcttcccctttctcctttcttttctcttcctttttcccttttctttcccttctcttctctcttctcttcagtctcttctcttcttctctcttctctccctcccctctcctccccttttctcccttctgtcatcttcttttcttttctttcacaggatctcagtctgtcacccaggctggagtgcagtagtgcaatcatagctcattgcagcctcaacctcccagactcaagtgtttctcccaactcagcctcctcagtagctgggactacaagtgcatgcaacaacacttggctaatttttgtattttttgtagagacagggtctcactatgttacccaggttagtctcaaactcctggggtcaagcgatccacccacctcagcctcccaaagtgttgggattacaggcatgagtctccatgaccagctcatttaatcttagtttgtgtgttaatcatttaaccttcatcattccccaaatctctctttaaaaataccctatagatatgtaaatcactgtaactcttatgtctcttcaacttttttatataaagtgacaactcaaaatacacttttccatttaatgttatttaatacaaaccattctattttttatgctagtatctccatttggccataaaacaatatatctagaaataaagtgtgagcttcaacagaaacaatgatctactgtttctatcaacttttgactatctataatcccttcgcttcccatctatcttcctcaaacaaattgaacttaattgtcaacttgaaatttctagagcttatgcaacttcaactcatttgtctttcccttgctttattcaactctactgccaaaattacaacctcggttaaatgcaactgtctgtgtgtctaatccttgccagcacccatgcagctgaacatgcccaaaagaacaatataacaatgattttcaacattttatatccaggccagaactctcctctgagtttcagatttatatatttaaatgcttacttaacatctccaattaactatttaatggaaatcccaaaattaatatatccacaactgtcaaattcttcacctacatcttctcccattttacaaaaattccacttttttccaatgaacatttaccgtattcatcattttgctctaatgtttcctcaaagtggtgcctaccttaatcgtattactaagtttttctaagcacttcatttttctgccctgctttgttttcctccttagaaccacctgatgcactgtatattttactaatacacagtttgtttctctcacctgctagaatataaattatataagaccagcgattttttatatcatgtttactttccaatgccataccaagatcagtacccgacactgaaacaaaggtagattattcagttttttaaaatgtgtcctgtggattactagaactgcaaaactcacttcaataagtctacgacacttaaaaaatacattcatgacaccttatcttcctggggaattacagtgatttctagtttttaaaagtaagaagacataaacttcagtttgaaaccaggactcatcatcccatagttagagctggtcttctttgtgtgctcagggactacagagaggtccggggtgttggcctcagcctcttggacaagggaagtgggcaccctatgagctcaggatccctgtccctagcctggataatggcagaatctggctcagccaggtccctggcctgcacaaagccagtggcaccaggtgaacgtgcccagctcagtgactgcctggagcaggtgtggggcagccagacccagtgggtgtgggcttgggagcctagccgcagaggatgagcaggacaagggcagtcagacagcccttagaaggcctccacccctgagctgcagaaagagatcccctcatccagctcctccccaggggcccactctggatcaacaggaaaatgtagcccctgatgtggttgtgcataactggacagatgggagacatggagctgaaggccatgtggataaccgcctgctggtatcccagttgacatcccagtaccacatatcgctgaaacccaggtcaccacatcaccaatggtcaagtcgatgtgaactgttgattgttgacgagtcccaggatcttttctgctcttgagcctgaccatgaggtagtagatgccaaagtcaggcaagcattgccaggcctgatggaggcacagctgggcctggtcggcaagagccaagccacattctaggggcttccaggatccgtgggatgagctgcttggccttgaacttttgtggaagggcagggtggggggtgtggagggagtaccaagaccacagaggctgaggcccctgacaagggcgccactgccctgggggtggttgccgaacccggtgcctgtctgctggaaggctacacctcgctggcggctgttccctgcatggtgcagcccctcctgggaagccagtggcagcccctgcagcatgcacccagctgctcctgctccgcaggtgggggtcgcttgcctttggtgagttggatgcagaactcgcagccagaggcgctaacaccagaaatgccctcacagcccttgaggttgagctgccgagggtgtggggctggtgtccactggggcgtggcctggctctcatggcaggattgcatgggttccttgaacagctcccagtgctggcctcagcccttcagggtcagcttctggggctgggagatttgaggacacaccttgacttctgtgacaaggtgtgtcacagaacacgggcttccagcccatctgtggatatctagccctccagcttctccaagctgctgagggctgcgtccaggccatccagccaggtatccacagcccatctcccctctctgagacagcctgattccataggattgcagagatgagacaccatcaacccctcctagatgcagcccacccctccagcagcagatctcactgagcagctcgcacagcggggtccaagccgcagaagtcttggggctgaaagtgcagccagagtcgcctggccctggcaccccgttaaatgaggcaccgcaggtaccagagcccgctgtgcagcagggattcgtccagcgggcgttgggccctggcgggcgagggagggtcgggcggcgtcggtcactggctcggcaggtggtcgcaggcctggattggccactgtcccagaagtgagccagcctccccggaagagcgctggagcgaagctgcccgctaggaccaccttggtcaggttgcacacctcctcgtccggttccttctagtctcaggagctggagtggggctggaggcaagtgagccccacctgcggggcaggagcagctgagtgcatgctgcaggggctgtcactggcttcccaggaggggctgaacagtgcagggaacagctgtcagcgaggtgcaggccacccttggcctttcaggagacaggcgcgggactcgggcaaccacccccagggccttggctcctccatcaggggcctcagctgctgtggccttggtgctcaggaactggagtggggccagatccgggacgccgggcactgtggaggctgtaggtggcggctgcggcccagaagcactgacgaaagcaccttgacagatcaagtcaaaatgttactgagggccgggcgcgggggcgcatgcctgtaatcccagcactttgggaggccgaggcgggcggatcacgaggtcaggagatcgagaccatcctggctaacacggtgaaaccccgtctccactaaaaatacgaaaaaattagccaggcgccatgctgggcgcctgtagtcccagctactcgggaggctgaggcaggagaatggcgtgaacccgggaggcagagtgagccgagattgtgccactgcagtctggcctgggcgaaagagcaagactccatctcaaaaaaaaaaaaaaagttattgagaaggccagttcattctctaggatgccagtggcaaacaaacatgaggatgaccagggagacgaggattttgagtgcttactttataaagtgtctataatatctgcagcagaagaatttaatggcaagttgttcagaagataagcctggaaatcttaaatgtcctatactcatttttaattatattgtatgttacatactctttggggcaagaatgatggagattatggaagtggaataagggctttccctctctgtttgcttcagaccacttctttgttaccattatcacaattggtacagttagctggatgttgtgttaaacacattaaagacatgttattggatgcgcattttaaccatatgggataggttttattaacagggtgtgaatatggctcaaacaatttccccagagtacgtaatggattagccaacactagtctgttttcctcccaagccctcttgactattattacatattcttcccatgagagaccaggagatgcctaaagaaagggatcgagggagcagaaggcgttttgtgaggaggagatatctgaatggtacttgagtataagttgctacacggttgtgtgctatgacgtctatccacaaagaacccagtttacccaataaaaccttcaaccaaccttcatatcttaatttttctttgaagtattcctctgagtgttgaagagaagtatgaaaatttgctccacagtaaactgcagagataaacagagatggctatgaaaatactacaactattattaaggaagacggctatttgccttttagtataaattgagtcaatgagatgcataaatattatttccaatatctgtgaatatttgcctaagacataatttattattattttcatttttaatttgtagatactattgtacatattgtgtacaatatgatgttttaaagtatatatattgtggaatgattaaatctagctaatgaacatatgcattgccttacatacaatttttgtgttgagaatacaacaattttaaatatttgtccaattcgcatttggaaaatacaattaaaataagcttaaaatgcctataattcacaatgcagtcataaaaattaaactgatgaaacacactaaagtcatttaaatgtatccttactcattgttcttgatgatatagtaaagcatcatcaaaatatagtagtctctattgttttagaatttgattttttagatctggtcataattatgctgtatagataaaactgtgtgttctaaacggatttgaagtcagaaacttgcactgccaagacaacactgtgtcttatcagctctgcctcaatttgcaaatcacgtaagctttctgaactccattttattcacttgggaagtgggaccaatacactaaatatttcagttaatacaaagtagaatacaaaaagaatcacactctagttccattccacatgagcacttcagctattttcctccagaaatcacctgtacaccataggaaagtaaattcatacccacctagttaacagtgtgagaatgtaagtttaaagcatgtttgactaaggaaacttaatcataataaaatggtttaatttccctgagcatgaaatattctccacaagaaatggcatgctatgtttaattggttctgggaatgattatccaatattagtcactttcatattagtgtcccctagagtggaaaataaataagatagtgattgcacttctgcatgtccatcttctgccaagacattttgctaatgtgcagtgtctgcaacttcccatttcttggctaagttcaagctttgttagtttagtgcttaggaaagcctcatgttctttcagaaattcttttgctctcattactttttgtgatattatggacaataatttgccttgggaacatgacaactgattccaacagttgccaatgttggggagggaggtgtcaaaaggtaggctttttcaatgtcaattttaacccagcagcaatttctgcagttgcaaataattctattttctttctggtcacttaagttctgtcaaattaaattagtgttcaaaactcatagcacagttttgcttttttattactacatctgcaatttgattagtgtgatatattttcatatatgaatgaatatcaattaaaggcaatgaacatttataggtaactttttcagccacagaggttagtaattttaacatgtaaaccatctgaattcatattgcaaccatatttttgtaatataagaaaatgtagattaaataagttttattagtattttaaatgtaataaaattattttctgctggctgcagtggctcacgcctgtaatcccaacaccttgagatgccaaggtgggtggatcacgtgaggtcactagttcaaaaccagccttgccaacatggcaaaatgccgtctctactaaaaatacaaaattagccatgcgtggtggcgcatgcctgtaatcccagcttcctgggaggctgaggcaggagaatagcttgaacccaggaggcagaggttgcagtgagccgagatcgtgccactgcactccagcctggtcaacaagaatgaaactcctttgtaaaagtattttcttaaaatattaaaatatagtttaatgtttcattaatatcatatgcccattaaaatgttgtattaaataactataatattactgagaataacttatgtttcagacatttcacttacattatttaaatcagacttcctaataacccacgtataaaccttggtatgaagtaactgatcctgagagatgtaaattatcttcccaaattcatgcatttatgaagtttatcaactgagttttctgacactatatgtaacatttttttctccatgccacgttggttcctggcattccaaagctcttgaagaacattgaaagaaaccaatggccttcatccgcatttcaaccaacaatgctacaatcacctttgttcacagtcctgtcttcatacaaaaagaaatgtttccattagtttccagcatcatctcacataattattattttggtttagaacactaatccactctcagaatttctcaaaaatacattaagttgctaacaatagtcagcacgttgcacaatagatctcttgaaattttactccttctctctgactgtagttgtgtatcctttgaccaacatctaccaaagtccattcccaaccacattagctgctggcaaaaaaaacattttactctctgcttgttaacttttttagattccacatatgaatgagactatgtgataattgtcttcctggcctagctcataatattctccaggttcatccatgttttcacaaacaacaggatttccttcttttctgtggctgaatgtatttcattgtatgtatatgccacattttctctacccatccccccgtcgatggacacaagttgattccatatcatgactactgtgaataatactgcaataaacatgggagtgcagatatctgttccatatactgattttatatcctttggataggtagatacccagcagtgggatcactggatcatatagtagttcaattaaaaaatttctggagaaccatagtacttagcggcctaatacttaatatttaatacatagagactgtactaatttattaggttagtgcaaaagtaattgaagtttttgccattgaatgtaatggcaaaactgcaattacttttacacgaaattaatatattcccaccaatagtgtacaagggttcccttatctccataccctgatcaacacgtttaattcttgtatttttgataataaccattataataggtgtgagatgacagcagagtggagctttagtttgcatttccataataattagtgatgttgaacattttttgcataagcctacttggccatttgtatgtcttcttttgagaaatgtctgctcagatcttttgcttatattttaatcagttcatttgccttcttgctattgagttgtttgaatttcttatatattttggatgttaattaccacaaaattcataacaatataaggtaatacatatgctaattagctagattcagtcacctcaccatgtaaatatacctcagaatatcatgtacaaaataaatacataaaattttatccttcaattaagaaattaaaataaaatgaaattttcagcatgatagacattcaaatatatgaatcacgtcatcccaacctctctttatcattttcagtagttacgggtgaaatctgagtcagggctgatgttcctagttccctactattatattcttaatacactgcagtttctcaatcatccttattaaagcagttaccaaaatttaaaaattaattttgagtgtactatgatcatctctggaaaattataatttgaagaagtgcttctatgaatgggataaaatatttcatttttttcagcattccacatttttgactcattgactcagctaaaccacataaatcttcacttttttctattttatatatcataatgcctatctttcagctgtgaaaaattatcaactatatttgtttattaactttgggaatatgaaattcagatcatgatcttctataaataaaatttagaagttttttttctaaccgaagcattcagacttgagcaaatgacaaatgtagaatattttaagtgttgacaaatatatacatataatatcaatgtttttgtgtttcgagtttctaagcaatatttgctagctgataaacttattttttatttactaataagaaataatttggattgcagaaatcaagatactctccttgcatgacattaagattaatagataaatgttatcacacctacaggcacatatgacaccaccagaactttacctaaatgattgttttccaacttatgtaattgtggttgtttataaacgtcttgtttattgttaatctttattataaacatcttgtttattattgaccttgtttataaactatctttactaattaggaaacttttttttctcttttctttttttttttcagagacaaggtctggctctgtcacccaagctggagtacagtggcaccagctccactcactgtaacctttgcctcccaagttgaagtgattcctgtgcctcagcctcccaagtagctgggactacaggcacgcaccagcacacgtggctaatttttgtatttttaatagagatagggttttgttatattactcaggctggtcttgaactcctgggctcaagtgatcaactattcctggcctcccaaagtgctgggattacaggcatgagccactgtccctagcctctgttttctttattgctttatttatctggttttgagttgggagatgatattaaacaagagttataattttccaaaaattgaaataaaaataattttaggctagaggaaaatgcaaacaatagcaacattaggatctattagcttatttgaattttgtaataaataaagatttgatataatgggaaatttaatatacttaatatgtaagtacactctcaattcttgaaggaaataataaaactgtatcaacatagaaagatataaaaaaatgctaagttgtcacaaaaaaaagaaattcacaaaaaaagaaattccaaagcagaagtcctggtatgttactattccagacaaatctgatatgagaaagcactaaagataattgaaacattaatttaataattaattaattaaaatagtacagtcctggatgtcttttttgtgctttctttaatttctttccagctatatataaatgtgtcttggtatgaatttaagtgcctgggaatgaatagtactgtcccccaggataataagttattagcaaattaataccttgcttctgttagttgtcaacatgttgcaagtaaacattgttgataggcactgtggatctactaagggtaagatatcatcctttcacaaaaggatagctattaaacctgactgtaggtaaagttaaattgcaactaaacatatgtagacatatactaagattttaaacattacacaatatttctgaccaataaaatataaactagagtctaaactgtttggttaagaatttcattgctagagtacccttacaagttctaactgaatttccaaaaatctaacattttgttctcaataaaataaaatgtgtttaataaatatgaagcaaaaaacaaaatcctaaacaaaagcaaacactgttgatcagtcaatttaacatggaatattattgctattatttttattgaccaataatttatttcctgacttttcttctcagatatggacactattgatgggagcggctggccatctggagtggcagttgccatcatgccagtagcgcttgggccgcatgggcagtgttgtcaggagcagcagcaggagcagcagtggcggtggtaggaccccgttccctgtgtccccaaggcatctgactgcgccgccgccccctaatggctgggcaggacccactgccaggtgcagaccctccatggcggcctcaatttcgcttcctaccacatctgggagcccatcagcgctggcagccgggtcttgcaggattggccccaggagcatcaggttcatttgtgcggcattagccagggcccccatgccacctgcacctcgcccatgcactactgcagggaaaacgcagagaggagtcacggccaaggctgcacactctatggagccagtggcagctggggacaagtgggagcccagccccttccaagttgccagggcaggaactccccaggcgcaactgcagctgcccaaggagggtctgcgacccaggcactcctgtgctcttgggagccaggagaaggcaggagccccaccctcccaggcacagctggagcctttcaagccacagctgcagacccaggcacctctgcactcttggggcctgggaaggcccccgtgaccacacaggctcggaagtgcctgcccccactgtctgggttctcctcgctgtcagcacctgctccaatcttcgagcaaagttgaggtcgagcacactatattgtgaccaatataaaatagatataaaaatacctcttacacttaaatccaggcattgccatttgaatgacttaagaatatgcagctaaggtgcttttaaaaatacaagctagtgattatactgaatttgtaaatcacgtaggatagtgagtcattttagaatattaattatttcagtccataaacctggatgtctttccttttttgtgttttctttaatttctttcattgatgtttgtaatttttgttatagaaatcatttacttcctcggttaagtttatttctaagtacatttttgtagctattgtaaaagaaatagcttccttaattttttttctgctagtttactatcaacatatagaaatgctactgttttttgtatgttgattttatatcctgcagctttattaaattcatttatcactctaagaagttttaggtagagaccttagtttcttccgtgtatgagatcacattgtctgcaaacaaggataatttgactgtctcctttccaattcagatgccctttatttctttctctaacctaattgccctggctaagactttcactatgtgaaatatgattggtgaaagtgggcctccttttcttgctccagttttcatggtaacatttttcaccttttccacgttcagtatgatcttagctgtagggttgtctttacgcccttttgtgttgaggcatatgttttccacactaaattgtttagaggcttttgtcatgtaagaacgtttaattttgccaaatgctttcattgtgtttattgatttaatcatatggttttcaatatatatccaaaggaaagaaaatcaatatatcaaagccttacctgcacccccatgtttattacagcactattcacaatagccaagatatggaatcaacataagtgtccatcaacagatgaatggataaagaaaatgtgacatacatatataatggaatactattaagttataataaagaacaaaatcctgtcatttgtggcaacatgaatgcaactggagggcattatcttaggtgaaataagcctggcatagaaaaataaacaccacaggccaggcacggtggctcacgcctgtaatcccagcactttgggaggccgagacaggcggatcacgaggccaggagatcgacaccatcctggctaacacggtgaaaccccgtctctactaaaaatacaaaaaaaaattagccgggcgaggtggcgggcacctgtagtcccagctactccagaggctcagacaggagaatggcgtgaacccgagaggtggagcttacagtgagccaagatagcgccactgcagtccggcctgggcgaaagagcgagactccgtctcagaaaaaaaaaaaaaaaaaaaagagaaagaaacaccacataactacatgttctcatttacgtatggaagcttagatagtagagtattggttaccatatacgggaaagagaaaggggagtatcagaaaaatttggttaacacatacaaaattacagctggagagaaggaataagttatagttctctacagcactgcagggtgactgtagttaaagggaatttattgtgtgttttcaaataactagaagaaaagatttttagtattctcctgcaaagaaataataaatgatttaggtaatggatatgctaatgactctgacttgatcattacacattgcataaatatatcaaaatatcactctgtaacccataaacctgtacaattattacatgccaattaaaaataattttaaaagagaaaaaatgaaataaaagtaaaggtacagaatttaactactttttcttctatgaaaccaggaagagtgaatttattagttttctaaaataaaaaaaaatcaaaatgaccaaaaaagagcaatatccaagaaaaacaacacttagtaagaatacttagaaaacttgggcactgtatcaccctgttcctagataccaatttacagatgaccacttaaatagaagtttattccagttaattcatttataatcccagagttcaaaattatgttgtacctacaataaatgagataacacgtttaaattatatggtactctgcctaacacaggttaataactcaatacaggttagcaataagcttttagtgtagtagtcatagtactatttctcacattgcaattttcttcattcagagacatgaatacaactttcttcatgactcctttttcatcaagatacctcttcaaattattctatttctttcattcagtatattagctgtgtatatcgatactgcattttttttttttctgagatggaatctcattctgtcacccaggctggagtgcagtggcatgatctcggttcactgcaacctccaactaccaggttcaagcaattctcctgcctcagctccccaggcagctaggaccacaggtgcacaccaccatgcctcgctaatttttgtatttttagtagagtcagggtttcaccatgttgtccaagctggtctcaaactcctgatctcaggtgatccacccaccttggcctcccaaagtgctgggattacaggcgtaagccaccgcgcccagcctaatattgcattcttggattttgaacactgaatatctttttgaaaggttacacctctttaccaattggtgctttggaaattattttccttcaagtgttctaagagtctaatgaagaatgaaggtcatgttttatcacttttgtccttaaagatttcagacatgctgaggctgagcttggtggctcacacctgtaattccagcactttgggaggccgaggtgggcagatcacgaggtcagcagttgaagaccatcctagctaacacggtgaaaccccgtctctacaaaaaccacaaaaaaagtagccggtcttggtggcgggcgcctgtaatccagctacttgggaggctgaggcaggagaatggctgaacccaggaggcagaacttgcagtgagctgagatcgcgccactgcactccagcctgggtgacagagccagactccgtctcaaaaaaaaaaaaaaaaaaaaaaaaagatttcagacatgctgaaactgaatgaagtatcattcgctaccagttagattagttctttctagttgtaggagtggatacatctttaatggtatattttgggttattgccttatttttgatgccatattctgtaaataattttttaaacctggcaaaactcggtcagcatagatttgtcaactttggtgttatattgtgtttgcttttaaaaactgcttttgaggccgggcatggtggctcttgcctgtaatcccagcactttgggaggccaaggtgggcggattacctgagatcaggagttcaagactagcctggccaacatggcgaaaccccatttctactaaaaacacaaaattagccaggcatgttgatgcatgcttgtagtcctagctactcgggaggctgaggcaagagaatcgcctgaatcagggaggcaaaggtagcaaccattgcactccatcctaggtgataagagcgaaactctgtctcaaaaaaaaaaaactgcttttgaatagagttgtaaatacaattttttatgaaaaaagaaattatcaagtgcataagttcataatacaaaaacaaataaaattcgaggcacaagttagtactaaaaaaattatgttcatttttccctaatacaacatgttttttcccttcatgaacaatttgtgttttactgagaagactcattatttatggcagaagttagactacagatgaatatgtactttaaacactctcagtagctttcttaattttacatatgctgctttatgcttctgtttattttcatttttccaatgtccatattctagtaaatttgaatattttaattcaagtttattgaatttaatatttaatattgcttgtataatttagtatttttaagactcaaaaaggtttatgaaaaaaagaaaaagagatcaacgtgttgctaatcatttaaagattattttaaaatctttgacctttatatgttaatgaataaaatgttagtagctattagtataaaataatttatgtcttttggacttagcatccagcatttctttttttaataaataaataattattctcctgtaatatattatgtttatctgggttttgaaaaatgatgtttcctaatatgagaaagccatttacatgtttaaatctacaaaggcaaatgaaatggtactaaattatttacataataacgtttagatggtgacccttataacattatttgtatacttcatacagagttgggaatatgcaatcctagaatatttctgggggcaaacccttcagtttgatgaacaaaacaagacttttaaataaaattaaacttttaaattacccaggttatggggccttttaattcaatggatatggagcataatgaattatccccttttcattgggtaataagttctcattcttaacttataatactcaaaataccctttaatttttaatttgtgattaaccatatcattatccctaggtattttagcttctatcttgaattctataataattttgaaacaggagaaagtattctttattaccatatgtgttaaacatcatggttttcaaatttaactgcaaatgtgtctttttcattgcttcctgatgacgcccttcaccctatccatattgtcactatcaagtggtaattacttttcaggttcacatatttgtttttttggaaaatcttctctgtgtcttataaagaatatgattgtaggcattcaaaaaccagtgaaatacacataattagcctgtggcctaactcatttctttaagaaactacactaattttacccacatactgatatttttattgccgcattatttctggagaaaataaatactgctaacatgatgttggtaagagagtaaaaaagtcttttctcgaaaagtgctcattgtagtattaacatatagtgtcaatttctttataaattcctcatacacattttattcttagagaaataaaaatgctaaaagtgaaatgactttgtttattctgcatattataagccacccatcttggtaatttagggtctttatagttagggtaagttgtgtcataccgaggtaacaaaacaaaaggtattttgtctcttttgggcctttcattattcagttatactgtcactttggctttttttgtaggtcaacctattgacctcagtattctgaaataatatgtttactatcttttgatcagcatttaaaatattagatttattgttactcttctgcctttattgggctggatgaataattgtttctctcactccacaaaagccaagttgcagagaaaaacacatagacattcagttgcaaagcaaagaaacgactattttctgcaattttaaagtgtacattgaatgaattaaaccatctttttattttcttttttgctcacttgcaaatattaacaacatcaagtgtattattgtaatgttatctaggtaaaaatctcaacaagttttcataattaccatttttaaatatataaataggggacctaactttaatttttaatgtctgaggccatgtctgttatttcactctttaaactcagttcgtaatgcagacacttagtaaatactcaaaaaatatgtgctgaataaaaaaggttaaatatgtaatatgtacaaaatctactggaaaaaatgcaccaacaattttatttggtataccagtttattgtagaatctttattgcctttaaataataatatacttttccagtgtctacaatgacttgtaatatttgtacacatataaaataatatttccaaaaatgtaattcagtaaggaaatataccttctaaattctagatttataatttaggggttaaattataaaatcattaaataaaatacaaatgacatatagtcaaagatccccttggaaaaaaattaagtggcctctaaagtgatgtattcatatatataattttacaatcaccctcagtttgctgttcctctggcattagaacagattgttgttgtttatttgctttaacatcaaaggtaaatgtttttgttcaaggacatatgtaaaaataaatgcatatggtttacaatagcatcatatttagtgataagcacataggacatgagaccatccgaaataaatgcagaaccaaatctctcatgcatatgcactcaaccactcatgtttattgataaaatgctaagtggaaaaacctgaattttgtaaatttgtctcctttgcctttttaaatatacacacaatcaaactctttgtgacttagtaatgaataagtaatactccattgcatatgtaataaaatgtgtggcataaaatcaatattaggtataaaaaatctatggcaataaggttagaaggaatgtgccatagcagcgattatctcatagccaaaaatataggtatttttagtctctgatttttttcattgtctacactttctacgaataacacagataacttttgtaacattttattctaaatactttaacatgaaagatacatttaaaaatactcattccatatacacactgatttttaaaatatttattatgatttctcatggagtttaggaatattcaaaatctactaaaagttatcatgttttatgatagctctcacttgctttaaaaaaaaattcttgataatttacaagtacgcagtgggtatccacctggggcctagatatcctcttggggactgatgtcatcctggagcctgatgtccacctgggactggctatccacctgtggccagatatctacctatggccgaatatccatttgggacctgaagtccacctctggccgaggtgtccatctgggacgtgatgtccacccgacacctaggtatcaacttggggcttgatgtctacctgtcctcagactgtgggcccctgagggtcagggaccacgtggacattttcagtaccatatgctgggcccaccagggcacctggcacacaggactaatgctaagggcagagttgctgagtgaataaatgggaggatgtcaaatgccccttcctgcttctggccatctcataatgtggagatcattcataagaacaggaactgcatgacctcagcatgactctcccctggacccagatgcatgagaacagcacagtgggcaccaggaacacagaacactgtcctcccacccaccctgtagccagcatcagcactgcagcctcaggcaggagcatcacagaacaaaacagggaactgcatttaggattcctcaagtcagtggctctccaggttcccaggaggcagacgagcaggatctgcaggctccaagggcagtgagaaggacctcagcagtctctcttgtcccctctttgcctccagttcctggggtgtaaagttcactctcgaggtgtcctcaccacagccagggcagcaatttcccccaacttccaaatgaagttcgatcgtgttccgggacttttgacacagggtccagtgcctgggcacattctgtcctatcccaaatcctcatccacccaaactaccaagcctctgtctgctccgaaggacccccagagtgaatagctttttccaagtgtctcagcacacacggggtcattcataaaaaaccaaggtcaacaaacactatccaagcatgtggaaccctgtggtttcatgctctaagcacctcacattatatacaggagaaaacggaggcttcgtctcctgtagcccctgtctacactagggcaggtgggatggtcgtagttccaggtgcccacagaggtggactgcaggaccccagttctgtcctttcaaggctgtgctgggcaaggccctggcccaggcagaaccctgggaagcttgcggattctcctgcccatcctctaggcccttgtctgagcctttctctaaactcagcacattgaatagggcttgctggctacatgtaggtcaagggtgtaacccccatatctctaattcctcacagagttcttgctatattctccgacccaccctgttctcagaccttcagactcagagaggtgatggactactgcctggtaactctatctggatatctaagagcaaaccctacatagcaaattgtgccaacactctatatatccaccacccacaaacccatcccaatcataatgcccaaacagaaactaaatacttggattagtcccatatgcagaaaaaggcaaattataaacaaaatattgttattgggttagtggaaaattattgctgtttttgacattatttttaatggcaaaaaccgcaataacttttacaccaacccaataggagagtgtgaaatgaacaggtctagtttgttgtgcttttctattttctgtttgttcatatttgttgctttctgtgtatctttgagagtttggaggaatttgtgaaaggaaccaggataaacattttttcctgctatttgaagaccacgttttttatctatgttacatctctattaatagctttttcaaaattctgtttcatctgcataccttatgttcttaattagtgttgctactaatatcaaaaattattttctcattttaatattttgtcttctgttgtttcttagtttgtttcttaaatttgttgtgctttttgtttacttgtatgctttttctaggttttcagaaggatgatttattagatttttagttttttccaaaaaatgtacttaaatttagaaatatacctccaatttctgttttaaatgcattctcaaaaacttacatatctaaaggtatttatcattatactacattgttttcataattcacctattgttttctctctaacttcaagattacttaataatgggcttagtgatttccaaatatctgaaaattttaattgttgctggctttgaggaatataatatgatattgatgatttagaatacattgattactcctttgttgtctagttcatgacctacatttgaaaacatgacaaaatttatatttctttgttgaatgtacatttgtatacttttagataaagttattgaccatgttttttatatccttttcagcttttttacttttgattttcaatattattgtactggcttaccaaagaactagttaaaattaattttctacctatttccctatcccatttgtctaaattaaaattacaaaattatacttttaattatacttatgttacagattttcatattttttgattaatgtttctttatcactgtttcttataaagtcatttttggtatcctgtgattggccctttaagtggtgatgaatagaaataataaagcaactgaagcaaggtgatatgaaaaaatgagaagacagaaacaaatcaatgtgtccgtttatgtgaagtttaactgtataagagcaataacaaaaaaaacccagaaagttgtttttcaaaactattcatagaaactgagattacacagagagagagagagagagagagagagagagagagagagagagacaggccccaggtaaagaccaggctcctcatagaactctggccccaggtggacactgaactccaggtgtacattaggcccccagttgatgctcaggccccaggaaggtaaccaggcttatgatggatatatggctccaggtggatacccagaatccagtgagaaatcagggacaagtgggcaccaggcctcagagggatacctacgaccctagtgacctcaggccccagttggacagtaggccacaggtgaactccagtcttcaggtggacatcaggccccaggggaaatacaggtcttaggtttactcctaagacacaggtggacacaggtcttaggtttacccctaggacccaggtggacaacaggccctgggtggccactggccccaagtatccagtttcctaagagctagggtgggcaaccccactgggcactgtggccaggcctgccatgtctccttgttcagctgccacattctgatggggagggcgggaggtgtcgagagaccacaatctaagttcttattacctgattttatttcacctccactgagtgctcactctcctctcacctaacggatttactctcatctgcaggtggtttaagtgtgaaggtttactgaagatttaaagagtgttatcacagttgggatgatttaaactaacagtacacgttgcattttaagaaaataattaatcctcagaggagatatgggttatggagccatgacaaattttcagcattacttcccttacttgttgtttccaaataaaagatttttgattccccattgatgttggatgagaacgctgagtgtgcaagcaaaatatcattttttaactaagggcccaatagtgtcttaaatatgcagagctgagtctgcaggtggagagtgatgggtttgttcaaaacgtggtatagagtggccttgggtctcacctgcctgcccttccatcctgtgccctcccagtgaggcacccaagccccaccttagggcacaccccttcacagggccacataggccccagtcctcacctatgtggtcatctccaaatggcacagcaacaccttctgtccaggcccaggccagggtcccagtatctccaggggggcctggcatccaggcatctgttgagaactggcccaatgttggggtctgggctagcctgtgggacctggatgttggggggcagctgcatgaggactcatgcctggctttatgtgtagcaccaggaaaggcactttaatcgtattcatttattgctcacaaaacctctgaggtgggtgccttccccacgtcacagatgggaatgacaagaaataataaggttaaagagcatgctcatggttgaaacctggtcaggaactcagaactggagtctatagacccctacctgtgacctctgtggccggaggaccctctctcaccgggtttgtgtttgcagcatgtcctgtccttccctaagggtctcaggttctgaggcatggtgagggctgctggagcccatcactgagctgcagaaggagatactaacgctggccatgccaccctccaggcaggcacaactggagttgaaaatcgagatggggcagggctgccaggaacagagggaggcaggtggagaataactcaccagggaggggtttccctgctacagctttccagggccatttccactttctgggtggcattttggggcagctcacacagtacacccacatagccagtccccagggtcacaatccccagatgttgttcatcttggtgacaggccctgtgcttctccaggaccgtttgtgtatgggcccttcccaggtaagcgtgatacgtcctggctgtcctcagtccagggcactgccagcattttcctttctggtcagggtcaaagctttgttgaccatctccaggatacgatggccagctggcccttggagagccagtcactccaggtgacacggtttggtactggacgtccgcggtcccctctcccacgccgccccatactgggccccgtatccagccgccaccgctgctgcagcaagaaccgccccactgcctccgcgcagctgccattgtttaaagggacctcagcctgacttccaggagctacgcaagacttggccaagtcaatgcgcatgcgcaaggagagagccgcttctccccatcacagcgattcccagggttgtcgtagaaaccactccctgaggcttcgcaaagcaggagccctccgtagcagggcttcggtgtcggggctccgaggctccggcctgacttctccacggggtacacaggaacgtctccggacgccaggacctgaaatgggccgactaggatgacgaaaccacaggcagagtccggggaagcagcgcggcatcccatcttcaggcctgcccggagggtgttcgggtgagtctccccaaaagtcgtgcccccgtgatctggaggacaggtctgcctgtgtgtccgtgggctgctctctcacccgagtgtcgttcgcgtggagagcagaaccctgcagcctcaagggttgcctgccggctgaggtgggggtgcttccatgacaccgctgtatgactgtgtgcgtgtgtgtgtgtgtgtgtgtgtgtgtgtgtcccattctcttctctctcgctatcactctctatttctttccctctctctgtcggtttgtatgtgtgtgtgtgtgtgcccttgtgcgtgtgtgtgtttggacgaatgtgccccgtgcaccagaaagcaatttcttgcatgtcagtcggtctttggtgagcctttttcggcgtctctccctgggtcctgtggccagttgtccatcgttttcctgtcggttccactttgggtttgtgaaggcctcgacaacgtgaggagatgcgtcgatccccgagcaattgaaatctcatccctatcctgagtggcctcttttctaggatcaagatgaccacactccagccaaggataaaagccccacaggagctcactgtcctgcaggagaggagcaggcccacgtccaagaagatggctgtatgttttcacggctcttctctgagaagtgaagccacaccacgatacagtcttgaagaggaagccaggaatgggagatggcaacaagccctgtcatggtggcctctctgaacaagttacccttttggcacccctccccttatgcccgtggcggtggcacagtgctgtatcctgcctgggctctggcccctgctctgtcctccctcttactctgtctcccttgtttctgaggggcctagatgcttctaggtctggctgaatgtcttcaaaaaagatcacttcccagtccatcagggagacagttggtggacatccttgtcatgattgtgtctctctccaaacctgtttctgcttgattgggcaggtttgatgaccctggagctcttagctttcatatgtgtctcagacagggaagctaccttggtctccatgtttcacctcatgggtagtggattgcctagaagcaatggtaagcgaccatgactggccttttcttctatgacgggcgcggtgtcgcatttcctctgcatctcctgtctcattcttgagggatgtcctctcctctgctcctgggtggactgactccctgaatcttttggccccctcctggattccaggtgttctttgattttgcttggcattgatggaaaggtcacttgtaccccccttcagttgggcacatgcctggacaccattgcttgtttcgccatcaccccatatgccctcggtgacacacatccacaccatctgctctgggatacaccagtgccacgcgtggtcgccttggttccacctcggaatcgccccgtccctgtttgcatgtgtcctggaaagcagtatcagcttgcaggagccccagggcttttagaagcggggcaggccactgctcttccaaaggaggagggaggcagagggctcatgggtcagtgaattttcagctgacactacgtcttgaggcccatgggaacattctgtgctgcagcgaggccctgcctggtcagcggatgtggtgagcccatcctttttcacctggaggggtccaaggtcggatccgaagaggcgtcctgagaccccagcaggcgcccttgagctctctcttcactggtggaagtcggctcaaggaggtcctgaagacaggactcctgagggtttggccctaggtcaccggcggacccctctcctacgctgccgctactggatcccggatccagccgcggccgaggttacagcaggagcgcgcctgcagcggcgcagcagccattgtttcaaggggacgcagcctgattgccaggagtggagcgcgagtcggccccaccaatgcgcatgcgcgaggcgccagaggattctgccatcagtgattcccatggttatcttagaaaccagtccccgaggcttggcaaagcaggagccctccgtggcagtgcttgggcgtcggggctccgaggcccaggcctgacctctccaggggtcgacaggaacgtctccggatgccaggagtctcaaagggcggaccagtatgacgaaaccacaggcagagtcccggggaagcagcgcggcatcccagcctcaggcctgcccggacggtgttcgggtgagtctccccaaaagtcgtgccccccgtgatctcgaggacaggtcggcctgcgtgtcgctgggctgctttctcacccgagggtcgttgtcgtcgagagcagaaccgcacagcctcaggagttgcgtgggggtgtgtgcttctgtgccactgctgtatgactctgtgtgtgtgtgtgtgtgtgtgtgtgtgtgtgtctcccattcgctcttctctctctgtctctcactctctgtgtgtttctttccctctctctgtcagtttgtgtgtgtgtgtgcacctgtgcttgtgtctttggacgaatgtgccctgtgcgccaaaaagcgatttctcgcatgtcggcctgattttggtgagcctctttctgcatcgctgcctggctcatgtggccggctgtcgatcgttttcaccgccgcggatccgctttgggtgtgtgaaggcctcgacggcgtgaggagatgcgtcagtcccggaacaactgaaatctcatctccatcctgagcggcctcttttctaggatcaagatgaccacactgaagccaaggacaaaatccttacaggagctcactgtcctgcaggagaggagcggacccacgtcagggaagatggtcgtatcttttcacggctcttctctgagaaatgaagccacaccaggatacaatcttgaagaggaagccgggaatgggagatggcagcaatccttgtccctgggatgctggcctctccggacaagtcacccgtttgacacccctccccttatgcctgtggcagtggcatggtgctgtatcctccctgggctctggcctctgctctgtcctccctcttgctctgtctcccctgtttctgagtggcctagatgcctcttggtctggctgaatgtctccaacaaagatcacttcccagtccatcagggagacagttggtggacatccctgtcatgattgtttctctctcccaacctgtttctgcttgattgggctggttggatgaccctggagagcttgagttccatagttgtctcagacaggcaagctaccttggtctccatgtttcatctcatcggtgggtggattgcctagaatgagcagtaggccactgtgatgggcctagtcttctaagacaggtggtgtcacatttcctctgcacttcctgtctcattcttgagaaatattctctcctctgctcccgggtggactgactccctgaatcttttagccccctcctggatcctggtgttctttgattttccttgacattgatggaaaggtcacttgtgccccccttccatctggcacatgcctgaacaccatcttgtgtttcgccattgccccatatgcctttggtaacaaacattcacaccatctgctctgggatatgccagtgccatgcgtgttggcatttgctccactttggaatcgcccttgtccctgtttgcatgtgtcctggaaagaggtatcagcttgcaagggccccagagcttttacaagtggggcaggtgactgctctttcaaaggaggagggaggaagagggctcttgggtcagtgatttttctgctgacaccatggcttgaggcccatgtgatcattctgtcctgcaacgaggcccttcctttctcagcagatgtggtgagcctatccttcttcacccagaggggtccaaaatcggatctgaagaggggtcttgagataccagcaggtaccctgaagctctccctccaccggtggaagtcagctcaaggaagtctttaagacaggactcctcggagtttggccctgggacccccgcagccccttctcccctgccgccccctactggaacctgcatcccgccattgctgtggctgcagcaggattccccctgccaccgcgcagtcgccattgtttaaaggggccacagcctgacttccaggagcgaagcacgagtcggcccagcaaatgcctatccgcgaggctctagctgattttcccatcacattgatttccatggttgtcttagaatccagtccctgaggcttggcaaagcaggagttctccgtggccctgcttcgttgtcagggctctgagcctccagcctgactcgcaagggttttaatacccttctcatcctcatctgcctctttgcgaggatcaagacgaccacaacccagccaaggacaaaggcctcacaggtgctcattgtccacccgcaggagggtgctcacagaccttcaagaagacggttttcactcctctcacactttgccctcattgagaaatctagccacagctagacacagggacagagaaggaagccagcaacgggatgcggcaagcatttctgtcacccaaacgctggccttcctggccaagtcacccgtttggcactttttcccagatgcccgtgatggtggcattgtgccatatcctgcctgggtgctggcctctgctctgtccttcctattgctctgtctgcccagtttcttggaatcctagaggcttcttagtgtggctcaacgtcttcaacaaagaacacttcccagtccatcagggagaaatttctttggggtccatttcatgattgcttccctctccaaacctatttctggatgattgggcaggtgtgatgatcctggagctctgggcttccatacctgtcttggacagggaagctcccttggtctccatgtccgaggtgatggctgcgttgtcggtccaggaagagtgggaggcgaccccaccgtggctgacctttgctttctaggaaaggcggtgttgcatcccacctgtgcttcctctctcattcttgagggccatccggttgctctgctcctggggaaagtgccttcaagcagtgaatcttttggttgccacagatgtgagggagccaaagggactgggttttgctggttttaggagaggtggcgtcagtggtacctacccggtggcagggtgtcgctgtggtggtttgtcgaaacctctcagcccctctggcaggcatccctgaatgtggcttggactcgggcacaggccctgtctggcaggttttcaggtgtgcttggcttttcctcagctttgtgtgggaggtcccagaagcccacggacgcacgcctggacgtcactgtcagtctcggcatcgccccatacggcctcagagacacacgctcactccatctgctcttgaaagacgtcagtaccacgtgtagtcacattggctccatctcagactcgcctctctctttgcatatgtcgcagaaagcagtttcgggatgccagagccctgggccttggagataaaggcaggccactgctccacccaggaaggagggaggcagtaggctcatgggtcagtgcattttcagccgacagtacgccttgtggctcttgggatctttctgtgccccagcgagacccttcccacctcactacattgtaaccccattcctgatcaccctatcagatccataatcagatccgaagaggagtccagaatgcccagccggcaccctgaagctccttctccaccgggaactgaagcagaagaccagaaaaccaatcaagaaggtcctgacgacaggactcctatgggtccaaccctgggtctcctgcagaccccctcctagtactcttcccacccgccaccttggactgcgccgctgcgccagtccccgcagcccgtcgtgtcgccgccattttttaaagggtccgcagcctgactctccggagcaaggggggagttggcctcgccagtgcgcatgcacgaggccagagtctctgctttggtaacagtgaccgcctctgttgcccagaagtgggtccctgagacttggcgaagtaggagccctgtgtgatagtgtgtcagagtcggggctgagaccagtcctggccagggtgttaacaggatggtctccggagatcgggattctcggagggtcgaccaccaggaagaaacctcaggagcaagaaagctcaggcagattgctggggaggcagtgcgagatcccaaactcaggccaggatttgcggagggtcaatgaggcccctctcccaatcttcacttcaccagccaccgccccagtccccgcagccgccgctctgccgtcatttattttattattatttttttttaatagtcggagtctcattctgtcacccagtctggactgcagtggcgggatctcagctcactgcaaactctgccgcctgggttcaagtgattctcttgcctccgcctcacgagaacctgggattagagggattaatcagaatcggggctaagaccagtcctggccagggcatcaacaggatggtctctggaggccgggattcacggagggtcttccaagaggaagaaaccgcgggcggaaggccgaagaagcagcgcgggatccctgcctcaggcctgcacggacggtgtgccagtgagtctcttcaaaaaaggagagatttgcttgtgtgcccatgggctgctctctcaccggtgggtcgtggttgcggagagtagaacccggaaaattcaggggttgcctgggggtaggtgttaccgtgccactgccctatgtctttgtgcgtttgtgtgtgtgcgtaggtctctctcttatttctctctctctcctctctcgctcttttgctctgtgtccgtctgtgtgtgcgtgtgtgtgtctgttgggacacatgtgccctgtgctccagagggcggtatcttgtacatcggcctttcttctggtcagcctctctcggcgtctctgcctggggcgtgtggccggttgtcagtcatttttccggtggctccaatttgggtttgtgaaggtctggcgaggtggggagctgcgtctctctcataaggatttaaatcaccttcccaccctgagaggcctcttttctaggattaaggcctccagcccccagccaaggataaaagcctcaccagagaggtcattgtctacctgcaggagctgtgtagagagacctggaaaaagatggttctcattcgtctctctctttcatctccttgagaaatctagccacagagtaacacaggttttcagaggatgggaatgggatgtggcaaggatctgtgagtgtgcaggctgtgtttcacatatcattaaacatagtctaatgagtgttctgcagatagctgacatttaagtttgttttattgaatcaaggaaaagaaaaaatgctgagaaaaaatgacacaacttccctgccacccatctgagtgttacaaatttaatagtaattttaatttatcttctcatgtaaaggtccttggcagtgatacctaatttcctaagatagccttgctttatttcgtatacttaagatgtcatgcatatcagagtatctggaaattcttcccaatgcccttgacatatgtgattaatcacattcccaaaataacataccaaaacaaacaacagaaaattatttgttacttaattccttcaaatttgtttatttaacttggggttccttcatgcacgaaacatttcatgtgtgtgtggcactcttctggtcacagatttcatcttaaataacctaagtattgaaatgcttgtgccctttgattaatttttactacataaatactttgattaaaagctacattgaggctgggtgcagtggctcacacttgtaatcccagctctttgggaggctgaggccagcagatcatgagatcaggagatcaagaccatccaggccaagatggtgaaaccccgtctcttcaaaaatacaaagaattagccaggggaggccaggcgctggctcatgcctgtaaccccacactttgggaggctgaggtgggtggatcacctaaggccaggagttcgagaccagtctgcccaacatggcgaaaccctgtttctactaaaaatacaaaaaattagctgggtgtggtggcaggcgcctgtaatcccagctacccaggaagctgaagcaggagaattgcttgaacccaggatgcagaggttgcagtgagctgagatcacaccactgcactccagcctgggcgacaagagtgaaactctgtcccaacaaaaaaggaagaaagaaagaaagaaagagagagagagagagagagagagagagaaagaaagaaagaaagaaagaaagaaagaaagaaagaaagagaaaccttgtgtatactaaaaatacaaaaattagaccctgaaggtcacatctgaatgagaaagacattatttggctcaaattgactgacactaaggaatagtgcagactggacaagtgaggtgacttacacctataatcccagcactttcggaggctgaagctggtggatctcctgaggtcaggagttcgacctcagcctagccaaaatggcaaaactctgtctctactaagacaaaaattagccgggcgtggtggtgcacatctgtaatcccagcttctcaggaggctgaggtgggaaaatcacttgaacctcgaaggcagaggttgtagtgagccaagatcgtgccaccgcactccagcctgggtgacagaatgagactccatctcagaaaaaaaaaaagtatgtaaatcactaatgtatcaaagaaaacagtcattcatgtattgcaaataaatactcaaccaagacaaaaaggcacgtcacatcttatgggaaaagacggaaatgacggtgagaggaaaactgtgacccttgaatgtaagacagaaaaaaatcagggcacgatgttaaggaattggaaataattctccatattaaaggaatacaagagacagaaagagaggagagagagacacgatagtcacagactgcaggggtgtggggtagatgggaatcaaggaggcagagagagcagtgggaatgtacataaaatcaccctccagagctgtgctgtccaataagtctgctgaacacttgaaagatggctagtccaacctgagaaatgctgtaagtggaaaacgcatttaaaaaaattctgaatacttagaatgggccagtgtgggggttcatacatgtaatcccagcattttggaaggccaaggcgggaggactgcttgagccaggagtttgagaccagtctgggcaacagagcaagacctcatctcttcagaaaaaaaaaaaaaaaataggccaagtgcagcggctcacacctgtaatcccagaactttgggaggccaagataggtggatcacttgagctctggagttcgagaccaacctggacaacatgccaaacccctgtcttaacaaggttttttgtattttaaacatggaagaaccccatttctactaaaaatacagaagcagccaagtgtggtgggccatgactgtaatcccaactactcaggaggctgaggcaggataatcctttgaacctgggaggtggaggttgcagtgagccgagatcgcaccactgcactccagcctggcaacacagtgagactctgtctcaaaatatatatatatacacacacacacaattttggagcgaagtttcaaaatcaatcagtaagcactacccaccaggtttatccttacataaagtgcccgctctgccttgaaaatcttatgctaagtggaagaagcccgtcatgaaatatcacatgtaattccatttaaataaaatgtccaaaatacatgaatgcgtagagacagaatgtagatttgtggtggcccagggttaggggagttgggggaaatggagggatatggggtttactttggggtaatgaaaatgagctaaaatttattgtggtgatgtttgcacaactgtgtaaatatactgaaatcattgaattttacactttaaatgggtggcttctgtgatatgttaatatttttcaataaaacttcaagaaaaagagtacctgtgtgcctccagagtccacatttttacacttgatgaagaaatcaagatattgtttcttcttcttctttatttttatttattttattttattttttgagacagagtctccctctcttgctcaggctggagcgcagtggcgtgatttccgctcactgcaacctcccagctaatttttgtatttctagtagagacggtgtttcactgtgttggctaggctggtctcgaacttctgacctcaaatgagtccaccatcttggcctcccaaagtgctgggattgcaggcatgagccactgcacctggctcaagatttagtttccattgtttcagatgccctaggaccattttattctactttaatttctgatgcatcatcgcagtggacattttacattagctcccaaagtattttactctgtttaagattttatcagctgggcacagtggctcacacctataatcacaacactttgggaggccaaggtgggaggatcagttgagcccaggaattcaagaccagtctctgcaacatagtgagatgcccatctctaaaaaaaaaaaaaaaatgtttaattaggtgggcgtattgttgcatgactatggtcccaaccagtaggtaggctgaagtgggaggatcacttgagcccaggaggtcgaggctgcagtggccatgattacaccactccattccagcaaaaatatttttaattacatttttttaagaaaacaaaatatacacttagtgacttgatacaaatgaatgacttttataatctacagaaaccaaaaaaataacaataatataaacccacagccattcttcttatgtgagtctctggtgtctctgagttgtaagaattgtgaattatgattaataacaaatatgcatgacaaggactcaataagggataggcattgataaactgcaaacaacacttactggagtaatgtctttaaagttgtacaagaagaagaaaaggcattgaaaaactgcgttggctaacaaaatactgaagttcacctaagtccattaatcagcacacgcacacacacacacacacacacacacacacaatggatgtgtaaaatggtcaacacagtctcccatgaatgtatcattttattaataggtctgtgagggtaagagatgaggttctatagatcctggaatcagggatggggaatctgtgaggtccctgaagtgatagatgagggtctgtagattggtgatgggtggtcttttggatactgatgaggtccacagaatcaattcttgtggatatgtagggtcagtgatgagggaatctggtgtcagtgatgggatgtgtgtggaatcaatgagaaagtgtggaatcaatctgtgaaggccagatttgtggtgtcatctctcaggctgacacatcctgatctgtgtgtcagtggtggaaattctatggggtcagagtgtgacagtcagatccctgacactgggtgttctgggtccggccaagtgcacagattcccttacctggtcctggctggagaggcccttctcacggactcctcacgtgaaaagtgggttgtcggcggtttttgcttttgctttgttttgtggtgggggtgggtgggttggctttttctttagggtttggttttgcctcttagagaccacagacacatgcagctcttaggaagaaatttttgtcttggcgatcgctaggtcctttggaccaagccatttaatgggaacgaagctgaccattcccttagagcagttcagatctagacggtcgctttaaggtgtccacaagggggactgcaagtggattgtggctttgagtggcaggtgggcgggaagaaacaactaagaaagacacacaagctgtcctcaggctgaatctatcacagctggaagaacagcctccctaacccatcaggcgccaatgggaggtgcctctgggctgtgagaggctggcggaggcgggacttccagacccagaaagtctgggcacagaagcctattactgtcagacgctgaggcgttgccgtgggaaccaagggcctttcgggtcagatcagagcctttctcagacaattctttccgtaactgacgagctcctgtccagcgcacgcctctatgaatgcttagtgtgccgtctcgggcagagtcttatttggtctgagagccacttgtttcttaaatccctgcgctaatcttgccgtctgctcctacgtagcccaggcatttgctgcatgctggtcctttctttcctgacaggggagctgcctctccagcttcctgggaggacagttcaaattatggaggaggggaggtgcagggcagcagtgcccaggggagtacaggggagttgggggagcaggggctcatttttctttgtagctcagattcccaagcctgtgactttgagaatctttgtcttccttgcaacgtttcaatctgaggctcttggggagagggcagagttggagccggatggaagcctggtggtgagaggagtgggtggagggaacatgaagaacgtgtcaggcggtgtctttatttctggcaccttactttgcctactggagtttcccagtctgttccagacgcactctcttgatcctgagggggcctgaggaggcatgttggttgccagtgtgtgctcccctgaactcgattggaattggtcccacaaactttttttttttgagggagtctcacactgtcacccaggctggagtgcaatggggtgatctcggctcactgcaacctccgcctcccaggttcaagtgattctcctgcctcagcctccctagcagctgggaattcatgtgtccgccactacacctggctaatttttttctatttttagtagagacagggtttcacaatgttggtcaggctggtctcaaactcctgacttcaggtgatccaccggtcttggcccctcaaagtgctgggattacaggtgggaaccatcacgcccgacaaatcccacaaatttaggcattatgatacatcggagccaccacgccccaccaattacacatatttaagcattatgatatattgctacttttagaatcacttggtttttatattgtgtttttcccccccatttgtttgtttgtttattgagacagagtcttgctgtgtcacccagcctggagtgcagtggcgcaatcttggctcactgcaacctccacctcacagattcaggcaattctcctgcctcagacttctgagtagctgggattacaggtgcatgccatcacactcggctaatttttgtatttacagtagagacagggtttcaccatgttagccaaggtggtctcaaacttctgaccccaagtgatccacctgcctcggcctcccaaagtgctgggattataggtggaagccaccgtgcccggcctcccctccttttcattcagggattttaaatgttttatttgctccatctgttatgtatgattgccttgacgatttcagcttgaatgaaaattacatatttttgcctgtgattattaatattgaaacatattaaaataatacatgttcataatgaaaatgaaacattacaaataaatacacaggaaaggcagtattccccctccagttccactcttgaaaataaccagttaacaggatgatgaacatctttccatgatgttctccaagattcatataattatttgcaataatacaatggcatatatgggccaggtgctgtggctcatgcatgtaatcccagcactttgggagactgaactgggtggatcatttgaggtcaggagttcaggactaggctgtccaacatggtgaaaccccatcgctaaaaaaaacacaaaaattatttgggcatggtggtgggcgactgtattcccagctacttgggaggcagaggcacgagaatcacttaaacctgggagatgaaggttaccgggagccgatatctcactacttcactcccacttcggcgacagagtgagattccatctcaataaataaataaataaagagaaagaaagaaaaaaagaaagaggaaagaaacaaagaaaaaaggaagaaagagagagagaaagagacagagaaaggaagcaagcaagcaagacacaaaaagaagtcgtgtgctcaggttgctaagatcgatggtaagaacaaatcctctagtggtaaaagtgtaagaaggaaaaagaaatttctgttagtcttgttggtttcaccccaagctctgaaaagtacagcacgtgtgtgataagttcttagttaagttgaaaaaggcattaaatttgtgcatggaaatcataaacagaaatgtgttctgattgacagcaattgggtcaatgctacgcaaggttcaggcatccactgcgggtcttagaacaggtctcctgcagataagggagggctactatataatgtttctttcttttttctttaattataaagtattctcctgtttatataacaatttgccatcgatatcactttaggtataaagatattaggatatctttatagtagataaaaactaactcattatttgtaagagttaaagtatcttccattatatgagcatttaaaatactaaagtacttttgccaccagaaatagtgcttctgtaaatattcttttacttatatctttaaattttacttctgctgaaatgaattgcatgaggaaacaaatgtttgtgtataaaatgtaatatatgtatatatatttaatatgtgtatatacaacttaatatatacacatacatacaataacataaccaatttttttgttgttttttgagatggagttttgcaccgttgcccaggctggagtgcagtggtgtgatcttggctcactgcaacctccacatcttggattcaagtgattctcctgcctcagcctcctgagtagctgagaatacaggcatctgccaccaagtccagctaactttgtccttttagtggagatgggttttcaccatgttggccaggctgctgtcaaattcctgaccccaagtggtccactgaccttgccctcccaacatgctggaattacagatgtgagccaccgtgccaggcctaacatatacaatttaatgtatatacaaatataggttgggtgcagtggctcactcctgtaatcctagcacattgtggagctgaggtagggaactgtttgaacccaagagtttgaaatcagcctgggcatcatggtgaaaccctctctgtccaaaaaacacaaaaatgagttgggtgtggtggcacacgcctgtgctcccagctactcaggagactgaggtgggaggatagctggagcccgcaggtcaaggctgcagtgagttgtgatcatgccactgcacaccagcgtaggtgacagagtgagcccctgtcttagacaaaaacgaatcaaaccaaatataaagtttatgcactacacacttgatttctttccaaagggttttacaacactatactttcaccagcaatatatgcaactactcatttcctacatagtcactatcacttgtgtgcagtcaaggaacttagtaggcttgaattgtccaaatcctgcacactccaaagaaaggtttgactctagcccagctcctgggaaatagcctttaagtccttggactctcctgcctatctgggagttaacaaggtgatttattgtggggaccttggaccatgcagtgtcagcttgaccttgggaagggggagacagagaaactaaggtcatccaaatgggtactcttgtccatgtgaccaacctccagtaaaaccctcaaccccaaggttcaggtaagcttctcatctgggagtattttctgtactttctgccacatatcactgggtgaattaagcactgtccacatgatgccactgggagaggacaactggaagcttgtgctttgtctctcctggactctgccctatgcacctttttctgctgctgattttaatctgtatccttttgttgtaataaactataactatgagtataatagcttgactcagttttgtgagttcttctaatcaatcactaaacttttgggaccccaaaacacaacgttgttgcttctttaattgaattctccatgttatgtaagaaacctatgtgcataattgaaaatcccactctaagaaagagatttccatgcagtctactcccccaccatttctccaatgctcccaagtctactttctgaataatcaaatgtttcaattttctaaatttagattataaactatttataatctatatatctgagtgcttatctctgttatataataggtagatcctcctccttctgttttttttttttttctgagacagagtcttgctatgtcacccaggctggagtgcagtggcgtgatctcggcttactgcaagctccacctcctgggttcactcccttctgctgtctcagcctccccagcagctgggactacaggtgcccaccaccacgcctggctcatttttttgtatttttaatagagacggggtttcactgtgttagccaggatggtcttgatctcctgaccttgtgatctgcttgcctcggcctcccaaagtcctgggattacaggtttgagccaccacgcccgacccctccttcttaatatatcaacttgatatattacctgatggcttcctgttctgatagctgatgacttggctgacactcacctcttaccccagtgcctgaaccactttccttatatggtgctctcattattttctttttcttttcttttctttttcttttttttttgagacagagtcttgctctgttgcccaggctagaatgcagtggcacaatctcagctcactgcaacctctgcctcccaggttcaagtgattctcctgcctcagcctcatgagtagctgggattacaggcataagccaccatgcctggctaatttttgtattttagtagaagcggcgtttcaccctcttggccaggctggtctcaaactcctgatctcattatccacccacctcagcctcccaaagtgttgggattacaggcatgagccactgcacctggcctctctcactattttcaatggctctgttggttactgttcacaacattcaacaattagacttatacctcatttatttatttatttttaattttttctatttttaggtttaagggatacatgtgcaggcttgttacatgggtaaattgcatgtcactggggtttggtgtacaaatgagatcatcacccaggtagtgaccacagtacccaatagttttttgacccatagcctcatgccaccctccccactcaagcaggccccagtgtctttgatcccatctctgtgaccatgtgtactcaatgtttagctccaagttataagtgagaccatggagtatttggttacctaatgctgcattaattcatttaggataatggcctccagctgcatccatgttgctgcaaaggacatggtttctttttctacggctatgtagtattccatggtgtataattaccacattttcattatccagtgcactgctgatgggcatcatatatgcaacttcacactatactactaggctacagtaaccaaaatagcatagtagtggtacaaaaagagacacatagaccaatggtataggttagagaacccagaaataaagtcacacacctacaaccatgtgatcttccacaaagtcaacaaaagcgaggaatggggaaaggactccccattcaataaatgattctggaataactggctacccacatgcagaagactgagtctgggccccctacctttcaccatatacaaacattaactccaaatggattaaagatttaaatataagacctcaaactataaaaatcctggaagacaacctaggaaatactcttctcaacatcggccttggcaaggaatttttggctaagattccaaaaaagcaattgcagcaaaaacaaaaatagacaagtggtacttaattaaaccaaaagctggaggccaggttgggcagatcacaatgtcaggagtttgagaccagcctgaccaacatggtgaaaccctttctctaataaaaatacaaaaattaggtggttgtggcgcacacctgtaatcccagctattcaggaggctgagggaggagaatcacttgaacccaggaggcagaggttgcagtgagctgagaacgcaccactgcactgcagcctgggtgacagagcaagactccgcctcaaaaaaaaattaaataaagtaaaataaaagtgtaaacacaacaagacaaactatcaacagagcaaacaaactacagaattggcgaagatactcacaagcgatgtatccagcaaaggccaaataatatccagaatctatagacaacttaaacaaatggaacttaagcagaacccttactctttagcaagttctgtatgcataagcctctctttgttcttattttggtggcctctgtttatttacacaaagagaagaactgctattcctgtaaatcatggctttgaaaatggtcacagtttgctgggcatgcttgctcatgcctgtaatcccagcattttgggaggccaaggtaggtggatcacgaggtcaggagatcgaggccatcctggccaacacggtgaaaccccatctctactaaaagtacaaaaaaattagccgggattggtggcatgcccctgtaatcacagttactcaggaggctgaggcagaagaatcacctgaatccgggaggcagaggttgcagtgagccaagatcataccactgcactccagcctggatgacagagtaagactctgtctcaaaaaacccaaactgttcgggataagtggctcatgcctgtaatcccagcactttgggaggctgagtcaggtggatcacaaggtcaagaattcaacaccagcctggccaagatggtgaatccccaactctactaaaaaaatgcaaaaattagccaggcaccatggcaggtgcctgtgatcctagctacctgggaggctgaggcaagagaattgcttgaacccaggaggcaaagtttgcagtgagctgagatctcaccactgcactccagcctgggcaatagagtgagaatctatctcaaaaaaaaaaaaaacatggagaaactccatctctactaaaaatacaaaattatccaggcttggtggcacatgcctgtaatcccagctacttgggaggctgaggcaagagaatcgcttgaacctgggaagcagaggtttcggggaggcggaggttgaggtgagccaagatcatggcattgcactacagcctgggcaacaagagtaaaactctgtctaaaaaacaaacaaacaaacaaaacaaaacaaagaaaattacgcacaacttatttcctggtttgtgataatctgtgaaatacattttgaaatgaattggaattcaatacagtactattcacaccccaaatactcctaatatttcctttcagagatgatgacctggcactcttcctaggacttgacttctccctacaggtccccagtacaagtatttgtgattctgagttaattcattgtctacatgtgtgacaatgcaatgctcttgttgttgtaaagtaccaagatgagtcaggtccaaactgcacatttgtagagaacatagtatatgtgcaattgagcatgtatgtggttatgatactgaaaataatacgaacataggccagagcagtggctgatgcctgtaatcttagcactttgggaggccgaggcatggagatcacctgaggtcaggagtttgagaccagcctggccaaccagcctggccaacttgctgaaaccccatctctactaaaagtacaaaaaattagctgggcgtggtggcaggcacctgtaattccacctactcaagaggctgaggcagaagaatcgcttgaacccgggaggtggatgttgcagtgagccaagatcacaccactgcattccagcctgggtgacaagagtgaaattgtgtcaaaagaaaaaaaaaaaaagaagaacattggccttgggcgtttctttaggttgcctcctgtgttctatttatagcatgcctttatcagggttttggggtttgggactaattcccaactttctggcaccgtaaagtgtttcgattcatctggtattttccctgacccagacatggaataaaccatttatttaaagatccttggtttcttttattgaaaagtattatttacaaagcaccaaaatcttgggctgggtgaggtggctcaggtctgtaatctcaacactttgggaggctgaggcaggaggatcccttgaggccaagagtttgagaccgtgcaagatcaggccatgcacaatggctcacacctgtaatcccagcactttgggaggccaaggaaggtggatcactgaaattcaggagttcaagaccagcctggccaacatagtaaaaccctgtgtcaactaaaaatacaaaaaaattacccagaagtggtggcacctgcctgtaatcccagctacatgggaggctgaagcaggagaatcgcttgaacctaggaggcagaggttgcagagagccgatcgtgccaccgcacttcatcctgggtgacagagtgagcctccatctcaaaaaaaaaaaaaatctttgcaagatgaatgctacaaaatgagggcaaattgttggctataatcggaagactttttctcgattgaatgctctatcccaaagttctatgagaggtggtttgtgtgtgtctattggctgccttgtggatagtatgtatgattgatcctcagtgctttgggaattatgtaaaatagtttatattatgaaagtaattcaacctagcattaattgtgctaagtgttgaaaacgaaaagtgttgactacatctgaatgaatgagtatctggcttaccggttttgtttttgttctgttttggttttttttgtttgtttgtttttgttttttgagatggagtctcactctgttgcccaggctggaatgcagtgacatggtctcggctcactgcaacctccacctcctgggttctagcaagtctcctgcctcagcctcctgtgtagcagggactacaggtacatgccgccacccagctaattttttgtattttagtagagacacggggtttcaccctgttggccaaggctggtctcgaaatcctgggttcaggcaatccacccaccttggcctcccaaagtgctaagagtacaggcgtgagccaccgcaccagcctagcttacactttacagcttgtttcttatgcataatagtttttgtttggttggtttttgtttgtttttacaaacagggctatgaaaccatcaagatttgtggatcatcaaaaaacaaaacatcctgataaaattgagaaacaatgtttaaaaagtttaaaatcgaattttgaactgtaacactgttacttcttatttaagaaggacaaggagccgggtgaggtggctcacacctgtaatcgcaacaatttgggagaacgaggcgggtggatcacgtgatcccaggagttggagaccagcctgggtaatatggtgaaaccttgtctctactaaaaacacaaaaactagcctggcacggtgtgtgcacctgtaattccaggtactggaggctgaggcaggagacttgcttcaacctgagaggcggaggatgcagtgagccgagattgcagcaccatgctccagcctggactatacaacgacactcgtctaaaaaaaaaaaaaaaggataagcaaattatggtgaaataattgccctataaaattgcagaaataggccaggcgcagtgactcacgcctgtaatcccagcactttggaaggccgaggcaggcggatcatctgagttcgagagtttgagaccagcctggccaacatggtgaaaccctgtctctactaaaaatacaaagtcagccaggcgtggtggcacacgcctgtaatcccagctactcgggaggctgaggcaggagaatcacttgagcccaggagatggaggttgcagtgagctgagatcgtgccactgcactccagcctggctgacagagcgagactctgtctcaaaacaaaaaaaaaagaaagaaaaaaaaagattaatcgttgtaaaaccccatagtgctttatagttgctgaaactgtcataggactcacattagagaccgtaacttcaatagtgatgtatcacattgccattatttcacaatcactcctattgagcaataattcaattcaaagatgctttaatgagatgtcaggtaataccaaagagtagctgattaatcaagtaagtttcctattcagatcaatgaaatcagttactgagagtaaggcctgacaataggacatgtttgttatttcaataatgactgcaaactagaagaagagatacttgtaaaatctttagacactgaccgtaccagaacatctattcttgctgctataaaaacttggtttggggctgggtgcagtagctcacgcctgtaatcttagcactatcatttcctcatatgatatggaaaatgccgacctctgcatcctaactctaaactaatttcccactcacttactaagcttcagtcacaccaggctgctttctgtttccggaacgctccaagtgctctctgatttttcagggtctttagtgtagctgtgcctctgcttggactacccttccacactgctggcttctcaccaccaaagctcgagggttatctctcagacacccatcctatcaatgctacgcgaagtatccctcaagttactgcttataccacctattgatttatttcatagtatttatcacaatataaaattacttcatttcccccctttaatttaaaatcttttttttttttctccagactagaatgtaaacctcatgtgggcagcagacatgtctgcttattttttttttttttttgagacagagtcttgctctgtcacccaggctggagtgcaacggcgcgatctcggcgcactgcaacctccacctgccaggttcaagcgattctcctgccccagccctccaagaaactgagattacaggcgcccaccaccaggcctggctaatttttgtatttttagtaggggagcagtcggactctggactatatttcctggaggatcctgcaggccgataccacgtctcgcgagattttggcttcctcttagccaggtggcagaatctttcgctgtgcgcaattagctgctgccgcgccttggagtctggagcaacttggccaggctggccccgagcggaactagagaaagctgaggatgaggaatccggcttctgtccttttgtgtgtggagggctgaggagaggagtttgcgtgtgtgattgcgatggttgccgtgggtcttcgtggtctgtgactgtggctgtgtggtgctgactctgggtgatcaggtgggcgcttgtgactgtgcgcgctcggagtggatgtgtgtgtcctggacgagccgcgttgtgtgtgcggatgtggacaaccgttgactgtgtggttggggatgcgtgtcccagggtgggtgtgtgactttgcgtgtgtgtgcaatactgtgtgtgcgtgagttgcaggtctgtagctgtgcaggtgcaacttgtgtggccccgtggtctgtgtgagagaggagagtgtgatcggctgtgaggcagagggtaagtggatatagggaggcatgtgtgcgattggaactttgtgtgtccccctgagagaaaaaaccctttagggagttagggcgggtccttggtaaaactcctttaaatagagaacagcctgaaaaatcaggctgcaggcacagagaaggaaaactagcacagggggttgtcctaaagacattcctcagctgcattgataagggaccgaggcccaacatagaaatgcctttgtcctttgtgtgaccagcgggcttccaggaaatagtcactttttttgtgggcatgtatacggtgggctctgttaaattttgaagggaaggtgaaggttaaagaaagagagagagttggcggctctatggaggggaccaactaaatgccagagcccactgccgcttacaggctggagcaggaggggtctgggcagtatggcttgttgcctgggagaatgttgataaggatgtttcttgggcctttccccagcaggatgtgataaggaagtcaggcggttgggtaggatgtttctctcagcccaaaccccagtggaatgtttccctctgaccagggtctgtgaaatggtgggggcttacaaaacggtgcagcttggactagcaggctctggcggccactttccttttctggacatgctttggactgtgagccgagcctctatgaatcatcacttcagcccctgattggtcctgggccaaactttcactttagcccctgattggtcctggaccaaattttcacttcagcccgtgattggtcctaggccaaactttcacttcagcccctgattggtcctaggccaaaatttcacttcagcctccgattggtcccaggctaaggtcccagggccaaacgaagtagtgctttctccaagacagcccacagaccagtgagcacattcctcccctgcccagttcacaaaacccccagattcagcctcctagttggcaaacctcttttgggtcccctctccgctggggagagctttcttcttttgcttattaaacttccgttccaatctcatcctttgtgtccacgttccttaatattcttggctgtgagagaaagaaggcaaagacaagagcctttatcctaacaactcaattgctggagagaagattcgtgcatattctatgtggcatcacacgccatagccctgggattgaaagccatgcagtttatcggatggtgtcaatctcagtccaaatatgtaataagatctttcactttgctgtattttaggggtaggaatgagattgggggtttgatcaatagtttgtacccataggaccagggatttgcccagtcatctgtgagtaaatgcttaggccagtttccatgtctgtattgaattaaatactcatacggttctgtgattttgtcaaatacagatttggtctttgtccctattttctggcatacaactcctaaactccttggaatctcctaagtgcttgctttttttttttttttttttttttttttttttttttttttttttttttaaatggagtcttgctctgtcacccaggctggagttcagtggcgcgatctccactcactgcaacctctgcctcccggattcaaacaattcttctgcctcagcctcctgagtagaccacaggcatgcgccaccatgcctggctaatttttgtcattgttttcttttttagtagagaaggggtttcaccatattggccagtctggtctcgaactcctgacctcaagtgatctgcctgcctcaggctcccaaagtgttgggattacaggcatgtgccaccgcacccaggctttggctttttatatgttagtgattgaccgatagcttcaggatgggggctgctcatcagaaagaccaaggcaggattagagggttgggactttcagcccctaccctcccacccctggggagtggaggggactgaggactaagttgatggcaagtggccaatggtttaatcatgcctatgtaatgaagcctccttgcaaacccaaaaggagtggattcggagagcttccagagagctgaacacatggaggttcctggagggtcgtgcccagggagggaatggaagctctgtacgccttcccccatacctcacgctaggcatctcttcatctatatcctttggaatatccttataatcaaacagtaaatgtgtttccctgaggtctgtgagccattttattctagcaaattaatcaaacccaaagagggggtcgtaggaaccccaaattaaacccgtcagttggaagttccagagggtgggacttgtgactggtgtctgaaaggcgggcagttttgggggctgagccctcaatctgtggggtgacactatcacatggtagatagtgtcagaatcgaattggtggccacccagctggtgtctgctgcagaactgattccttgcttgctgatagggagaaatctcctcatattttgaggccacagaagtcttctgggtagattgttgtggttttggtgtgaagcagaggaagaacacaggttgagtttttccaaatgggttcacattgggggtcctcaacctcaaatccatcaactccatcgctgaatttttatttatgtatttatttttatttatgaggtagggtctcactctgtctcccagactggagtacagtggtacaatctcagctcattgcagccttcatctcctgtgctcaagtgatccttctactcagccttccaaataagctgaaaccagaggcacacactagcactcttgcataattaaaaataattttcagtagagaagaagactcactgtgttgtctgggctggtcttgaactcctgacttcaagcaatcctccccctctgcctccaaagtgctatgattacaggcatgagctgcctcacctatcactgattttctctttctttctttctttctttctctctctctctctttctttctttctttctttctttctttctttctttctttctttctttcttcctttcttttttttttgacagagtctcactctgccttgccaaggttgaactgcagtggtgtgatctcggctcactgcagcctccgcctcccgggttcaagtgattcttctgtctcagcctgctgagtagctgggattacaggtgcccgccaccacacccgaccaagttttgtatttttagtagagacagggtttcactatattggccaggctggtcacgaactcctgatctcaggtgatccacctgcttcagcctccaaaagtgcagtggcaggatcagggcatacggcagtcttgacctctggggctgaagggatcctccctcctcagcctcccaagtagctggattataggcatatggcaccatgccgggctaatatttgtaatgtttgcacagatggggttttgccatgttgcccagtctggtcttgaactcctgagattcaacaatcttcccacatgagcctcccaaagtgctggaattacagggaagagtcactgcacccggcctgtcactgcatttttaaagggaaggaggactatagtgagattcactaaggcttacaaaaaaggtagaaacctagatagattaaaagacagagattataatatccttgagatgataatattcaaatttagctttcatagatagggaaatttgaagtacatcagactataaggtggcattttgtgcaactaattaaaactatgttgtaactaacctgcacaatgtgcacatgtaccctaaaacttaaagtataataaaaaacaaaaacaaaaacaaaaaaaacaaaaaaaaaacaaaaaaaaaacaaaaaaaagaaagagagcaattgcattttcattactgagtaatattaagcaacaatgaaaataaatagaaataaccaagaaattgttatatttaaatcctccctcctttattggaaagagaagtattgatatttttagattctaatcaaaacttcgcttttaaaaaaattgatgattctatggagatagggagggaataacctatgtttattgaacacctaatattccacttacccgaatgtcatttattctatattctagtttttttgttgagacagggtcttgctctgttacccagcctagagtgcagtggggtggtcacagctcacagatatataccaccatgcctggcttattattttattttattttattttattttttgttatttttgcagagacggtgtctccctatatttcccaggcttgacttgaacttctgggctcaagtgatcctcctgccttggcatcccaaagtcctgggattataggcataaaccactgtgctcaaccaatattatagtgttaatagtagaagtgtcttagtgtactggaaaactttttctaaattttgaaaaaatattaaaaaacacgttggttttatttggccaatactgatttctttgctccatcattatttattggcattattagcctgttgactttcaatttccttacatccctttcactccatttcttttattttgtaccccaaatagaaattctttttttttttagatggattctcgctcttggctcttgtgacccaggctggagtgcagtggtgcagtctcagctcactgtaatcttcaccttccaggttcaggtgattctcctgcctcagcctcctgagtagcctagattacaggcaagcgccactacaccccactaattttttgtattcttttttttttttttttgagatggagtttccctcttgttgcccaggctggagtgcaatggcacgaactctgctcactgcaacttctgcctcccaggttcaagcgattctcctgcctcagcctcccaagtagctgggattagagggtgagccaccacacccgactaatttttatatttgtagtagagacagggttttgccatgttggccaggctggtctggaactcctgatctcaagtcatccgcctgcctcggcctcccaaagtgctgggattacaggcatgagccactgtgcccggcattttagtatttttatatttatttatattttgatagacagtctcgctctgttgcccaggctggagtgcagtggcacagtctcggctcagtgcaacctccgcctcccaggctgaagtgattctcctgcctctgcctcctgagtagctggtattacaggcacctgccaccacgcctggttaccttttgtattttaattagagacaaggtttcaccatgttggccaggctggtcttgaactcctgacctcacgtgatctgcccaccttggcctcccaaagtggccttgcttgaggccaggagtttgagaccagcctggccaacatggtgaaacctgctctctaccaaaaatacaaaagaaaattagctgggtatggtggtgtgtgcctgtattccaagctactttgatggctgagtcataaaaaatcacttgaacccaggaggcagaggttgcagtgagctgtgatcacctcactgcactatagcctgggtaacagattgagacttgtctcaaaaaaaaaaaaaattcttggcaggacgtggtggttcacacctgtaatcccagcactttgggaggccaaggtgggtggatcacctgagatcaggagtttgagaccagcctgactaacatggagaaactccatctctcctaaaaatacaaaattagctgggcgtggtggtgcatgcctgtaatcccagctattcaggagggtgaggcagaagaattgcttgaacccaggaggcagaggttgcagtgagccgagatcacaccactgcactccagtctgggcaacaagagcaaaactccatctcaaaaaaagaaaaaaaatctttactttggataaatacctagaaatggaatttccaggttggcctttagatattattaatggatttaatatgaaaaacctttacttgaggatgtataaagctttaaaagacagggtccctattcttaagttataaataaagcagcatttgtaaggtaatattcagaaaacatcagataatatcctataaagtcctcctgttcatgctgatgacattgtatggccagttaaggatgacacttcattctgtcccctgcaaccacggtcctgacatgtctaaatgacactggccctatgagaacactgtggatgtgaaagcatttcctcaagttatctttttggcctgctggttttaatctaatgatgggatatccaaagtgaatctaaaggagtgacatgattgtgcatctgttggggggaatcagagacagctagagcaaaggcagacacgtgctgaactcatctgtcttaagagctgaagcaagcagcagtattgctagcagagctactgcacatctgcacatgtgctccaatggctctgatctgtttttttcccagtatgaacctaatacatgaggcaagttagaaaatcggagttggccaggcatgatggctcacgcctgtaatcctggtactttgggagccagcgtgggtggctcacttgaggccacaattttgagaccagcctcagcaacacagtgaaaccccgtctctactaaaaatacaaaaattagctgggtgtggtggcaggcacctgtaatcccagctatgggaggctgaggttgcagtgagccaagatcaggccactgcacttcagcctgggtgacagagcaagactgtctcaagaaaaaaaagggaaaggaaaggaaagaaaatcacagcttgttaacctcttgcagctaaacacatatgcacaaaaattattcagtaaaagcaaaacagttttggtgtatcttgagattttgttttatatccaaaggaagactatatcttttatctttgaactactctttggaaaatgccttctatataacaaatgttatagttttcttctaattgggtcttgaggtctctcaggagaatggctataaactctacctcactctaatggggctctaggggaggggcctgtgggtctttagagtagcctttcaccagaaatttctttttcctggaccacagcctaatgctcaagtatctgacccatgaccaggtgtctcacaggaaacttgtttatactggcagatgcccttgtaacttttgtctgacctgtgtgcagtttattcctaccatgatacccactcttttttttttttttttgagactcagtcccgatctgttaccaggctggagtgcagtggcacaaccttggctcactgcaacctccaccatctgggttcaagcaattctcctgcctcagcctcccaagtagctgggactacaggtgcacgccaccatgcccagctaatttttgtatttttagtagagtcagagtttcaccatgttggccaggatggttttgatcccttgacctcatgatctgccctactcagcctcccaaagttctgggattacaggcatgagccaccacgcctggcctttttttttttttttttttttttttttttgagacaggatcttgctctggtgcctaggctggagtgcagtggcaggatcagagctcactgcagccttgacctcctaggttcaagcaatcctcccacctcagcctcccaagtagctgggactagaggcatgttccactacatctggctaatttgtatatgatatgtatttttgtagagatagggttttgccatgttgcccaggttgatcttgaacttctgagctcaagcaattcacctgccttggcctcccaaagtgctgtgattacaggtgtgggttaccacacccagccaatgtacatttaattatcaaagtactatctatactattttatggaagtactaattatcaaagtgcaatagaggttttgttgttgttgttgttgtttttcttttgagacagggtttcactcttattgcccaggctggagtgcagtggtgcgatctcggctcaccgcaacctccacctcccaggttcaagcgattctcctgcctcagcctcccaagtagctgggattacagacatgtgccaccacacccagctaattttatatttttagtagagactaaaatggtctctccatgttggtcaggctggtctcgaactcctgatctcaggcgatccatccgccttggcctcccaaagtgctgggtttacaagtgtgagccactgtgcctggccaatagaggtttttcaactttttgtagatatttttgaaagatcctgtcttcctttaaaaaaagagacaaggctggatgtggtggctcatgcctgtaatcccagcactttgggaggtcaaagcaggtggattgcttgagctcaggagtttgagattagcctggccaaaaggcaaaacctcgtttctactaaaaatacaaaaaaaaaaaattagctgggcatggtggcgcatgcctatagtcaaagctaatacagaggctgaggtgggaggatcacctgagcctgggaggttgaggctacagtgagctgtgattgtgccactgcactccagcctgggtaacagaacgagaccctgtttcaaagtgaaaacaaaaacaaaaaaaatgaaacaagagaaaaaaaacaagaaagaaagtggtgagggggaagtgcctatttattaagcttttgttgtaaatagtaacttgcatatcagatgtttactgtaatattcttgaagctttgccaggcctgcagcttgctgtgtgcttttcaactctatttcatttatttgggaaataatatatcaatgtactttattcattcccagctctaaccatggaatactgggaatgtcccattctatgaaggaggtttgccggccacaacaggaatattcatgaacatggaggtcctttgttgaagttacactaatttttttactcttccccattctgagcctagccggtctgctcactatattcgctccatccttcagcacccttccatctcttgcttcatcttaaaaacctttcctttaatttcaacagtgctgcctgagtttgtcatttcaggggttgggcatgttccaggatctgtctatagacttctctcaggaggaatgggagtgcctggacactgctcagaaggacttatacagagatgtaatgatggagaactacagcagcctggtctcactaggtaagtatgtctatccccaaataactcatgaattttgagtgtagctttcacttgtctgggtgacttttcacctgctgcttagggaattgttttgtgttttgtagattaatatatgggcagctctttgggttcccttcatcttctccatgcttcagacctttacaccttcctctagtccttcatgagtactaagggactaactttgaattcaggaacagcacgagtatgtcttacttcttttctttctttctttctttctttctttcttttttttttttttgagatgaagtctcactctattgcccaggctggagtgcaatggcatgatctcggttcactccaactttcatctcgggttcaagcgattctcatgtctcagcctcctgagtagctgggattacaggcacctgccaccatgcctgaccaatttttgtgtttttaatagagacggggtttcaccatgttggtcaggctggtcttgaactcctgacctcaagtaatccacctgttttggcctcccaacgtgctgggattacaggagtgagccaccatgcctggccatcttacttcttttcttatagacaggtctctctatcccaaagcctgatgtgatttccttactggagcaatggaaagagctctggatggtttcaagggacgtaccaggaggatggtgcccaggtgagtaaggactgagcagatgaggaaggcactgctgtttagaacccagcccatcagggaggcagcactgtaaaggtattggttgaggaatctcttctgcaaggtcccatgtaagagttgtggcctaagacacatggagaaaagtcaagatacccccgtcacacacacacatttttttaattttttttaatttgagagagagtcttgctcagtcacccaggctggagaacagtgatgcgatctcggctcactgcaacctccgcccccgggttgaagcgattctcctgcctcagcctctaaaggaactggcattataggcgcctgccaccatgcccagtaatttatgtatttttagtagagacagcatttcaccatgttggctaggctggcctcgaactcctgacctcaggtgatccacctgccttggcctccaaaagtgctggtattacaggtgtgagccactgtgtctggccaagaacccccttttacctccacctcttcagtctgtgctaccctcttgtcatcgtttctttccatttcaaagaataacattcccttcttcagaagccatcctgtttcctctatcttggagctacttctttcactttaaaaattaaacctgtgttgctgccttaaaaacaaatcttttaaaatatatttatttttcatactgatccttgactttttttgccttgtcttttcttggctagttttcctttaatgcagccatttcatgcatgaatggatattcattcactattttttttttttttttggatacagagtctcactctgtagcccgagctggagtgcagtggcgcgatctcgtctcactgcaagccaataagaagcgcttggggatgacctccctacaagcacagcaaaacttttcttgcgcatttctgcgctggaacgcctacccgctccgccaaaccaaaactttactatcacccttagtgccgtgtcctgcactttcttggagatttgtaccaggcgctggagactctcccacctggtccatgcccgccgcccggtgagcactgagacccaaccttgtgcaccgccagtcttgttatcaacaaacaggctagtaaattataaaaaataaaataaaggaaatgtagctggccgtggtggcatgtgcctgtaataccagctactccggaggctgatgcaggagaatcgcttgaacccaggaggtgaaggttgcagtcagccgagatctcaccactgcactccagcctggatggcaagagcgaaactccttcttgaaataataaataaaataaaggaattggggccgggcgtggtggctcacgcctgtaattccagcacttttggtagccgaggtgggcggatcacttgaggtcagaagtttgagaccagtctggccaacatggtgaaaccccgtctctactaaaaataaacaattagtcaggcatggtggcgggcgcctgtaatcccagctatttgtgaggcggaggcacaagaatcgcttgaatcccggaggcagaggttgcagtgagccgagctcgtgccactgcgctccagcctcggcgacacagcgagactccatcttaaaataaaataggctggctgagggtgctcatgcctgtaatcatagcactttggacgccgaggcgggtggattgcctgagctcaggagttcaagaccatcctggcctatatggtgaaaccccatctctactaaaaatgcaaaaattagccgggcatggtggcgcatgcctgtaatcctagctacttgggaggctgaggcaggagaaccgtttcaacccaggaggcagaagttgtagtgagccaagaccgccacattgcactccagcttgggcaagaggattgaaactccatctcaaaaaaaaaaaaaaaaaaaaaaaacaaataaataaatataaaagaaatagacaaagcaaaccttaatgcatgaactcaaacaaatgctttcactgccaggctccatctttgcaaatctgaacctagaacaatgtgcacgtttctaactagcaattctggaggacagatcagggaggcagtgtgagcttgcttttctgcaatttaattgactggtcagtaaagtcagtgtttgcaggcattttcaatgttctgtagtgggcttcagttcctatggcagtgtggcaggccaggtttccaatagcaaccagaagagtttctactaaccattttctataattttgatgaatgcataagttaacgttaaagaaatggagaaactggtgcctgagtatcagggatggaatgtgaaaacaaacctattgaaaccccgcctgggttttctcagaccctaaagtctgatcgaataatgatagcattggtacacattcacttcggcctgtcttaagattcagaaactttcccagatgctagagaaatctttccagactctagacccaagttaaagattagatgttgattgaatgaaacactcctgcttgtaggtgcaatcccacatggagcttaagatgtatataagcactagaaaaaaaaacttgtaactttgagttgatctggtgagttacctggcgcttctccctgtaaatggctgcagaaataaacttccttctttcccagtctgtctgtgtcttgttattgagcaattgcggtggacctgcccagcaaagtcctcttttgtgtggttatctgggactccttttggagggaacattttaaactttccatttcagagcattctgttggcactcttacactgtttttctctgcctaccctgggacctgagttctcctggacgtgaatctccagccacagagcctagaagcccattcctccacattctgtgactgttccccaaacacagggagaatttgcagaaaataagcccaaaaatcttgccattctttgcaataaaaccccacattacaaactgtggaaaacaggattttagcctgaataggtttttcctctatttgaaaccctttacaattttggagggaagtttccaaatcaatcagtaagtaccccccaccccaggtttatccttatgtaaagtgccccctttgcacatgcaagattgaataaaccttgaaaatattatgctaagtgaaagaagccagtcacaaaggaccacatgttatgtaattccatttaaataaaatgtccaaaatagaccaatacatagaaacagaaagtagatttgtggtggcccagggttaggggagttgtggggaaatggagggatatggggtttacttcagggtaatgaaaatgatctaaaatttattgtggtgatgtttgcataacagtgcaaatatactgaaaacctttgaattttacactttaaatcagtggcttctgtggtatgttatcaatatttctcaataaaacttcaaaaaaaaaatagtgcctatgtgtctttttatgtattattcctccagagtccagtccatagtttttacatttgatgaagaaattaagattttgttttgtcttcttcttcttcttctttttttttttttttgagacagaatctccctctgttgcccagactggagtgcattggcacaatcttggctcagtgcaacctccaggttaatttttgtatttttagtagagacagtgtttcaccatggtggctagactggtctcaaacttctgacctcaagtgagtcccccaccttggtttccaaaattgctgggattacaggcgtgagccaccatgcccagcccaagatttagtttccgttgttttgatgccctagggccatcttattctaccttaatttctgacgcatcatctcagtggaaattttacattaggttccaaagtattttcctcttttgaagattttatcagttgagtacagtagctcacacctgtaatctcaacactttgggaggccaaggtgggaggatcagttgagagcaggagttcaagaccagtctctgcaacatagtgagacacacatttctacaaaaaaaattttaattaggtgggcatatttgtgcattcctgtggtctcagattactacgtaggctgaggagggaggatcacttgagcccaggaggttgaggctacagtggccatgattataccactgcactccagcctgggtgacagagcgataccctgtcttaaaaaaaaattaattggaattttttttagaaaacaaagtatacacttagtgacttgatacaaatgaatgaatttgataatctacagaaaataaaacaaataaataaataaaaacccaaagccattcttcttatgtgaatctctggtgtctctgaattataagaattgtgaattatgattaataacaaatatgcatgacaaggactcagtaagggataggtgttgataaactgcaatgcacacttactggagtgaggcctttaaagatgtacaagaaaaagaaagaaaaggcattgaaaaattgcattgcctaccaaaacgctaaagtttacctaagtccattaatcagcacacacacacacacacacacacacacacacgcaataggtgtgtaaaatggtcaacacagtctcctatgaatgtatccttttattaataggtctgtgggggtaagagatgaggttctatagatcctggaatcagggatggggaatctgtggggtccctgggttgagagatgagggtctgtagattactgatgggtggtctttgggatagtgatgaggtccatggaatcaattcttgtgagtatgtagggtcagtgatgagggaatctggtgtcagtgatgggatgtgtgtggaatcaatctttgaaagccagatttgtggtgtcatctctcaggctgacacatcctgatctgtgtgtcagtggtggaaattctatggggtcagagtgtgactgtcaggtccctgacactgtgtgttctgggtctggccaagtgcacggattcccttgcctggtcctggctggagaggcccttctcaaggactcctcacatgaaaggtgggttggtggtgggttttgtttttgcttttgttttgtggtggaggtgggggtgggttggctttttctttagggtttagttttgtctcctagagaccacagacacatgcaacttttaggaagaaatttttgtctgggtggtcgctaggtcctttgggccaagccatctaatgggagtaaagctgaccattccctcagcgcggttcagatctagactgtcattttgaggtgtcctcaaggtggcgtgcaagtgggttgtggctttgagtggcaggtgtgtgggaagaaacaactaagaagacccaggagcgctcctagcctggatctgtcacagctggaagaacagcctccctgacccatcaggcgccaatgggaggtacctctgggctttgagaggctggtggaggtgggacctccagacctagagattctgggcacagaagcctgttactgccagaccctgaggcgttgccatgggatccaagggtgtttcaggtcagatcagagcctttctcagataattatttcggtaacttgtccagcgcacgctgctatgaaggcttaatgtgccgtctcccgcagtcttctttggtctgagagccacttgtttcttacatccctgtgctaatctcaccatctgctcctacataccccaggcatttgccacatgctggtcctctctttcctgacaggcgggacgtctctccagcttctgtgaggacaattcaaattatggaggagggggctgatgcagggcagcatgctgaggggagtaccgggcagttggaggagcaggggctcatttttctttgtagctcagattcctaagcctgtgactttgagtatcagtgtcttccttgcaaagtttcaatctgaggttcttggggagagtgcagaattggaacccgatggaagcctggtggggagaggggtggatggtgggaacatggagaatgtgtcaggttgtgtctattcctgacaccttactttgtctgttggagtttcccagtctgttccaaatgcactctctcgaccctgaagggacctgaggggggatgttggtcaccagtgtgtgctcccctggactcgattggaattggtcccacaaagtgttatttatttatttatttatttggagggagtctcgctctgtcacccaggctgcagtgcagtggggcaatctcagctcactgcaacctctgattcccaggttcaagtgattctcctgcttcagcctccctagtagctgggactacaggtgtccgccaccacaccttgctaatttttttatttttagtagagacagggtttcacaatgttggtcaggctggtctcgaactcctgaccaggtgatcgacccaccttggcctctcaaagtgctgggattacaggcgggagccatcacactccgccagtcccacaaagttaggcattatagtacattgctacttttgaatcacttattttttacttgtgtttttccccctccttttattgattgattgacacagagtctcactgtgtcacccaggctgaactgcagtggcacaatctcggttcattgcaacctctgcctcccgggttcaagcgattctcccacttcaaccttccaagtagctgggattacaggtgcatgccatcactcctggctaatttttgtattttcagtagagacagggtttcaccatgttggctaaactggcctcaaacttctgaccccaagtgatccacctgccttggcctcccaaagtgctgacataggcatgagcctcctttcccagacttccctccttttccttcagggattttaaatgttttctttcctccatctatttaataatatgtgattgccttgaggatttcaacttgaattaaaattacatatatttacctgtctttattaatattgaaacatattaaaataatacatgttcataatgaaaatgaaacattacaaattaatacacaggaaaggcagtattccccttccagttccacccttgaaataaccagttaacaagatgatgagcatctttccatgatgttctccaagagattcatataagtattggccagcaaacaacagaatatataggccaggcatggtggctcatgcctgtaatcccagcacttcgggagactgaagcaggtggatcttttgaggttaggagttcaagactaacctggacaacatggtgaaaccccattgctacaaaaaatacaaaaattatttggacgtggtggtgagcgccttaatcccagctacttgggaggtggaggtacaagaatctcttgaacccgggaggagaaggttgcagtgagccaatatcgcattactgcactccaacctgggtgacagactgagattccatctcaataaataagtaaatacataaaataaagagaaaaaaagaaagaaaaaagaaaaagaagaaagaaagaagaaagaaagaaagagaaagaaagaaagaaaaagaaagaaagaaagaaagaaagaaagaaagaaagaaagaaagaaagaaagaaagaaagagtgttcctatttctccacatcctctccagcacctgttgtttcctgactttttaatgattgccattctatctggtgtgagatgatatctcatagtggttttgatttgcatttctctgatggccagtgatgatgagcattttttcatgtgttttttggctgcataaatgtcttcttttgagaagtgtctgttcatgtcctttgcccactttttgatggggttgtttgtttttttcttgtaaattttgtttgagttcattgtagattctggatattagccctttgtcagataagtaggttgtgaaaattttctcccatgttgtaggttgcctgttcactctgatggtagtttcttttgctgtgcagaagctctttagtttaattagatcccatttgtcaattttggcttttgttgccattgcttttggtgttttggacatgaagtccttgcccacgcctatgtcctgaatggtaatgcctaggttttcttctagggtttttatggttttaggtctaacgtttaaatctttaatccgtcttgaattgatttttgttagaatggcaatcattaaaaagtcaggaaacaacaggtgctggagaggatgtggagaaataggaacacttttacactgttggtgggactgtaaactagttcaaccattgtggaagtcagtgtggcgattcctcagggatctagaactagaaataccatttgacccagccatcccattactgggtatatacccaaatgactataaatcatgctgctataaagacacatgcccacgtatgtttattgcagcattattcacaatagcaaagacttggaaccaacccaaatgtccaacaatgatagactggattaagaaaatgtggcacatatacaacatggaatactatgcagccataaaaaatgatgagttcatgtcctttgtagggacatggatgaaactggaaaccatcattctcagtaaactatcacaagaacaaaaaaccaaacaccgcatattctcactcataggtgggaattgaacaatgagatcacatggacacaggaaggggaatatcacactctggggactgttgtggggtgggggaggggggagggatagcatgggagatatacctaatgctagatgacgagttagtgggtgcagtgcaccagcatggcacatgtatacatatgtaactaacctgcacaatgtacacatgtaccctaagacttaaagtataataaaaaaaaaaagaaaaagaaagaaagaaagaaagaaagaaagaaagaaagagaaagaaaggaagaaagaaagaaaaagagagaagtcttgtgctcaggttgctaagatcgatggtaagaacaaatcctctagcggtgaaaatgtaagaaggaaaaagaaatttctgttagtgttgtttgttgcaccccaagctctaaaaagtacagccacgtgtgtgataagtgcttagttaagatgaaaaaggcattaaatttgtgcgtggaaatcataaacagaaatgcgttctgattgacagcaattgggtcaatgctacccaagtttcagacatccactgcacgtctcctgcagataagggagggctactatataacgtttctttcttttttctttaattgtaaagcattctccttttttaatataacaattggccacatatatcactttagatataaagatattaggataccattatagtagataaaaagctaactcattctttgtaagagttaaagtatctttcattatatgagcatttaagatattaaagtacttttgccaccaaaaatagtgcttctgtaaatattcttttacttatatctctattaatttttacttctgctgaaacgaattgtatgagcaaacaagtgtatgtgtataaagtgtgatatatgtatatatatttaatatgtgtatatacaacttaatatatacacatacatacaaaaacatatacaatttttttgttttgttttttgagatggagttttgctctctcatccaggctggagtgcggtggcgtgatctcggctcactgcaacttccactgcttggttcaagtgatcctcctgcctcagcctcctgagtagctgggaatacaggcatctgccaccatgtccagctaactttgtttttttagtggagatgggttttcaccatgttggccaggctgctctcaaactcctgacctcaactgatccgcccaccttggcctccctaactgctggaattacaggcatgagccaccgtgcctgacctcaagtgatccacccaccttggcctcccaaaatgctggaattacaggcatgagccaccgtgcccagcctaacatatacaatttaatgtatatacaaatataggttgggtgcggtggctcactcctgtaatcctagcactttgggaagctaaggtaggggattgtttgaacgcaggagtttgaaatcagtctgggcaacgtggtgaaacccctatctgtacaaaaaacacaaaaaatagctggatgtacttgcaggtgcctgtggtcctagctactcaggagactgaggtgggaggatagctggagcctgagaggtcgaggctgcagtgagttgtgatcatgccactgcacccccagcgtgggtgacagagtgagaccctgtctcagacaaaaacaaaaacaaaccatatataatgtttatgtgctacacactcgatttctttccaaagggttatataacactgtaatttcaccagcaatatgtgtgactactcatttcctacgtatttgtgtgcagtcaagaaaacttagtaggcctgaattgtccaaacctcgcaaactccaaagaaaggtttgattctatcctagctcccaggaaataacttctaagtctttggaatctcctgcctatctgggagttaacaacatgatttattgtggggactttggaccatgcagtgtcagcttgaccttgggaagggtggagacagagaaactaatgtcatccaaatggctgctcttgtccatgtgaccaacttccagtaaaatcctcaacaccaaggctcaggtaagctttttgttggggagtatattctgtactttctgccacgtatcactgggtgaattaagcactgtccacatgatgccactgggagaggacaactggaagcttgtgctttgtctctcctggactttgccctaggcacctttttctgctgctgattttaatctgtatttttttgttgtaataaactgtgagtataacagcttcactcggttttgtgagtctttctaattaatcactaaacctttgggacctcagaacacaacattgtttcttttttttttttttttttttttttttttttgagacagagtctcgctctttcgcccaggctggagtgcagtggaacacaaccttgtttcttctttacttgaattttacatgttgtgtaagaaacctatgggcataactgaaaaatcacaaactaagaaagagctttccatgcagtctacccccctcaccctgtttcttcagtgctcccatgtctacttcctgaataaccaaatgtttaaattttctaaactatttctaatctatatatctgagtaattatctctgtgttatataataggtagatcctgctccttatcaatatatcaacttgatatattatctgatggcttcctcttctgatagctgatgacttggctgacactcaccccttaccccagtgcctggatcacttttcaaacatggtgctctcaccattttctttttcttttcttttcttttctttttctttttctttttctttttgagacaaagtattgctctgtcacccaggctagagggcagtggcatgatctcggctcactgcaacatccacctcccagattcaagtgattctcctgcctcagcctccagagtagctgagattacaggggcgcaccactacgcctggctaatttttgtagttttagtagagatggggtttcatcctctcagccaggctggtctcgaatgcctgacctcatgattcgcccatctcggcctcccaaattcctgggattacaggcatgagccaccgcacctggccactctcactattttcaatggctctcttggtcacctttcactcaggagagtatctgaggcaggagaatcgcttgaacccaggaggtggaggttgcaatgagctgagatggtgccattgcactgcagcctgggcaacaaaagtgaaactctgtcaaaaaaaaaaagcagaaaagaaaagaaagcaagctcttcctccatatacctgtaaggatcattgtcttaattttcttcatgtcttaacatgattcttgccttgtcaaagatcatcctatctgaaattgaaactatttacctcttgccttttttccacagcacttaaaacttttatttttgagatggagtctcactctgtcacccaggctgaagtgcattggtgtgatctcagctcactgcaacctccgcctcccgggttcaagtgattatcctgcctcagcctcccaagtagctgggattacaggcatctgccatcacgcctagctaactttttttttttgtattttagtagagacagggtttcaccatgttggccaggctggtcttgaactcctttcctcaggtgatcagaaccacttcggcctcccaaagtgttgggattacaggcgtgagccaccacacacagccctggctaatttttgtatttttagtggagacagggtttcaccatgttggccaggctgatctcgaactcctgacctcaagtgatctccctgcctcggcctcccaaattgttgggattacaggcatgagccactatgttcggacttctttttaacaaaccatctctgttcttatattatgtccactagaatgtaaacttgatgagagcaggagatattgtcaattttgttcaatgctatttatccctagagcctagaactgtaccatgcacatggtaaggagacaaatatttgttgaatgaatttattgagcagctgttctcagatttttggcctcagaaattctttactctctgtttctttactcctgacctgaggtgatctgcccacctcagcctcccaaaatgctaggattataggagtgagccaccacgcccagccgcccaactcatttttgtatgtttagtaggcacatggggttttgcaatgttggccaggctggtctcgaactcctgacctcaagtgatcccccacctcagcctccaaaagtgctgagattacaggcatgagccaccccacccgactaaataaaccaaaaactttagataagtgaatttggaggaaatatttataacagataaaatagacaaacagataattctaatttattgtctctctgccttaataaaatattagacaataccctaagaagaaagaaacaaaatctaaaaattcaccattcacaaacacaaatagttagaaaacaaagtcaaaacctaagaacatgttgaccacttatctgtcctctgaaatcggctcttaaatgtgttgaacatagattgacttgggattaggaaatttttaaaatattttttaaagtttcactttttggaattgaaaattaatccagattatgtaatatacaacatttggaatttaccaatcaatactctatcattttatttttcactcttcaaataatttcttgttcaagagtttaaaatgcttttaaaattaatagattctgcaggctatagtctgcagagactgtctccacaaaaaataaaaatatatatacttttaaaatatatataaaatatatatttatttaaatgtacatgttttaagtatataaaatatatttttaaaatttcattttttcaccggattgtatggtaagcatatgtttagtctggcaggaacttgcaaaactgccttctacagtggctgtcccactttgcattctcagcagaaatagagatgagttcctgtcgctccatatcttcaccagcatttggtgttggtgtttgcattcaagccagtctaatagatgtgtaatgatatcattgttttaatttgaatcccctagtgacatatggtgttgagcatcttttcagaggtctaagaaatgtgctgggcatggtggcagacacctgtggtcccagctactcaggaggctgaggtgggagcgttacttgagccctggaagttggggctgcattaagccatgattgcaccactgcactccagcctgagtgacagagctaaaccctgtctcaaaaagataaataaggccaggtgcagtggcccatgcctgtaatccaagcactttggaaggccaaggcgggtggatcacgaggtcagcagatcaagaccatcctggctaacacagtgaaaccccgtctgaactaaaagtacaaaaaaatagccaggcatggtggtgggtgcatgtaatcccaacttcttgggaggctgaggcaggagaatcgcttgaacccaggaggcagaggttgccatgagctgagatcacgccattgcactccagcctgggtgacagagtgagactccatctcaaaaaataaataaataataaataaataaataattgacttaatttttagaacagttgtaggtgtacagaaaaatagagcagaaggcatactgagctctaatatccgcctcatactatagtacacacactttctctattatcatcttgttaatgtggtacatttgttatgtctgatgagccaatattgatattattaagttcatggcttatattaagattcactctttgcgttctaccatttatggtctttgacaaatgcttaaggacatatattcaccattatagggtcacacagaaaagtttcactgccctaaaaatcttctgtgttccacctattcatccttccctccactcaagcccctggccaccactgaactttttataatagcatctgcctagttttgccttttctagtattccatataattggaactctacactatgtggcctttttgtattggcttctttcacttagaaatacgtgtttaagattcctccatgtcttttcatgccttggtagttcatttctttttattcctgaagaatattccattgtatgaatgtttcagagttagtttatccatttctctattgtaggatatcttggttacttccaatctttgtcaatttgttgtaaacattaatgtgcaggatttgagtgaatataagttttcaagtcatttgggtatataccaaagaatgcaattgccagatcgtatggtaagcctatgtttagttttgcaggaatttgcaaaactgccttccacagtggctgtaccactttgcatttgtggcaacaatcaatgagagttcctgtagctccacatcctcaccagcatttggtggtgtcagcatttggatttgagccagtctaatagatgtgtagtggtatctcatcattgttttaatttgaattctctagtgacatatggtgttgagcatcttttcagatgcttgtttttgctgcctatataacaaagggtagatacagatgatggacttcagggaaagagcttgctatgacgataggaagctgcaggcagagatgatctcagggttaactggacaccaactgtgccttctcctgtcacataaaatgtggtctacctaagttttgactggaaacacagactatctggttgtccataaatatttctaactgaggcttaaggtttatgcatgtttcgaccaaaaggtgataccaccccaatatataagcaggtcggggtacaacaggtaatgactgtcagagatgttgagagtctacattgaatggtgtcactggctgcccatgcctttctcattaaggactttcacttttcatttgccacatgaaaggccactgagttaggctacatcttattttttctcttgagaatctctagtactgagaaatttttgcattctgggctacactgggttcataatctgactatatatattgtgtgtgtgtttgttccttccctaaaatgctcagttcagctgcagttctagaggtaaatactactaggtttccattttagagagttgaagatctgaggtctggagaggttagtgtgtagaaagttatgtttaataagtggcaagaccatgtggccaggtcagataagctgccttcagattttactctcgaacttctactggataatgtcttttcattatagaaaagaaaagagggaacttagatgtttttttcaaaatcattgactatagaatttctttcaagatatgatgaaaagcaataattgtctcattttatattacctataattattgctcaccagaaattgattatcgatgcagcaatcttttacgttcctgtctgctttattatgcatggccgggcttcattgtaaataagagatccaagattcagaaatatctttaacttgcaatgcttggtcacaggtatccatctgaaaaatattttgctcattagccatatggactcatatggtaaactacagccagagactcaaaatgtggaaaggagaaagggctatcagaagtcctgtgtctccttacattttgtgtttctattcatatgtatctagaatcatgagaaatttgagcaaatgggaaatgcaaagtcctagtccatgcatacccacatttcagttatctgcattattgcacatttaaatttataatgcatacataggatacaattcaataggtataaaaatgttaagtaatcttttctctcatgcaccccagtcattcagtgctcacttttgagtcagcattttaattctgttgtgcatactttcataattttttttttatctttttttttttttttttttgaggcagagtcttgctctgttgcccaggctggagtgcagtggcatgatctcggctcactgcaacctctgccttattgattcaagagattctcctgcctcagcctcctgagtagctgggattacaggcacgtgccaccacgcctggctaattttttgtatttttagtagagtcggagtttcactgtgttagccaggctgaacttgaacaactgacctcataatcttcccgcctcagcctcccaaagagctgaaattacaggtgtgagccaccacttccagccttctattcctttatatgtgaaaatcattttaacattccacatataagtaaggtcatgcaatatttttctttctgtgtttggccaacttcacttggtataatgccctccagtttcatccatgttgtggcaaatggaaagatcttgtacttttttagggctgaacacagaagttattttcatgtacaaggttgcagttgccatacacacaaatatgtatgtatgtgtcatagtcatatacaattttaaatacatatatgtgttctatgcatatataagtatttctctattttcacagaaatgtcagtctaaatcagtacctagggagggtcattgttttcttaatctacaaatcaagacaaagtatgagtggctgcaccctagtttaataagtcctctattattgaggatgttttcctgtttccttttgtcattgttgttgttgttttgttttgagacagagttccactcttttgtatgaagtggtgtgatctcagctcgctgtagcctcccgagtagctgggattataggtgcccgccaccacacccagctaatttttgtatttttagtagagacagggttttaccatgttggccaggctggtctgaactcctgacctcaggtgattcgtccaccttggcctcccaaaatgctgagattgcaggcatgagccaccgcacttggctgctttcaccatttcagactgagcttggagaagaacctgaagaaaaacatgactttaaaattttgatgaatggagaaatatctttccattcaccttcctttcctctatttcattcttattttaaaatatacaaacaaagatatggatacatcagttattaaagaaacatctatgtgatacctatccaggtgaagaaatagagcactatcaccactgagaagtcctctgtatgcccctaactgatcctaaagtcttccttccccttattagtaacagatacaacagatatccacattacctgtgggtatctgccatcctctccttggttctctttataattttattatgtattttctttcttttttttttttggagatggagcctcactctgtctcccaggctggagagtagtggcatgatcttgactcactgcaacctctgcctcctgtattcaagtgattctcatgcctcaacctcccaagtagctgggattacaggcatgggccatgtgccaccatgcctggctaatttttgtatttgtagtagagatggagttttgcatgttggtcaggctggtttcaaactcctgacctcagtgcctggccttattatgcatttttatatgcctaaattaaagtctgattttgcctggtttttctcttacataattggagtaaaagtctgtatcctcgtgcatttggccccttttactcaatattaagtatttaagattcacagtgagcattgtttctgcattctattaaaacagtacaccagccaggcatgatggctcatgcctataatcccagcactttgggaggccaaggcaggcagatcacttgaggtaaggagttccagaccaccctagccaacatggtgaaactccgtctctaataaaactacaaaaattaggccacattgtggctaatgactgtaatctcagcactttgggaggccaaggcaggtggatcacacggtcaggagatggagacaatcctggcaaacatggcgaaaccacatctctactaaaaatacaaaaaattagctgggtgtggtggcacacgcctatagtctcagctactcgggaggctgaggctgaagaatcacttgaatctgggaggcagaggttgcagtgagccaagtttgagccactgcactccagcctcggtgacagaacgagattctgttaaaaaaaaaattagccaggtgtggtggtgtgcacctgtaatcccaattattcgagaggctgaggcaggagaatcagttgaacctgggaggtagtggaggttgcagtgagccaagattgtgccctgtactccaacctgggcaatagagtgacagtctcaaaaaaaaaaaaaagcccaggcccagtggctcccacctgtaatcccagcactttgggagtctgagacaggtgcatcacctcaggacaggagtttgagaccacccttaccaacaagggtaaaccccctctctactagaaatacaaaaatttactgggagtggcggcgtatgcctgtaatcccagctactcgggaggctgagacaggagaattgcttgaacccgggaagcagaggttacagtgagccgagatcgcaccactgcactccaacctgggtgactaagcaagacgctgtctcaaaaatatatatataaatttatatttatatacataaaataaatataaaaaaaataagtaaaaataccgtacaccagtgtgtatcccttcattgttggtggacatgtgggttgtgttcatttttgtcagttacaaatgatgctgttgtgaacatgtttgtatttctatttggttaccattagtgtgtatttatgtacagtataaagcaagaggtgaaaccataggttacagggtaaacatatcgtcagttttaccaggtattattggtttcatcccaatgttaacacaccaactgtcagtcttacaatgtctgataattcccaaatctttgcattcttcttgacatttaattttgtcaaaattttaatttgagtcttttggtgggtatgtggtgatgattgtgatattaatttactgggccttttcttctctgtaacaggccctgtcaagatatatgtgtggtgtggcaggggtaggagcccctagaggtagcatgggctctggaatccttaatcatcctatgtgaaaaagttgatggggcagtgatttttctttctttctttttttttggggggggggacagagtttcgctcttgttgcccaggctggtgtgcaatggcatgatctcagctcactgcaacctccgcctcccaagttcaagtgattctcctgcctcagcctcccaagtagctgggattagaggcatgtgccaccacacccagctaattttttttatttagtagagatggggtttcaccatgtttgtcaggctggtcttgaactcctgacctcaggtgatccacccacctcagccccctaaagtgctgggattacaggcatgcaccactgcaccctaatatttcctgggtgcagtgttgtagccagggtgcaaagccacttaatgattctgtcatccaaatattatatcttctcccttccccttgagatatgctcattcccccatacaattaaagaatctcaattactcttgaaggggcataaaatcctctctgtctaatcatgggtccttccaaattatttgttggctgtgtttaaaatatgaaaaagagaatgtagattttgttttcttctttctgcttaacctgaacaaaatgtcatagatacctcttaacctgttgctaaaccaaggagagtcacttgaataatgaacaagactggagggacgccacatggataatttatcattacactatcatcacatacatggaactcatcaatgaagcttatgaaaaaaattgagtcatttgtggaaaagtgtaaagagaatataggagatgtctcaagtgaagagaaaaaagctgcagaaaagaattacaaaaaaagagtgttaagatgcaaacacaaattcagagattcaggagcacaaagggctaagttaagggaaaaaagagttaccaatattttcttattcattatggagagcaggatgaattctttaaaggtcaaataattgtgagtctgatatatctgatgataatttgtatttctaatgttgtaaatggttgtgaatttatggtcattattcctgtttcctttagactagtgaccatgagtttgattgacaaaaacccattgggttagtattgttatctatgtgtgttcatcatgctatgtgttaaaataagtccatcaatttttatcttgtgtttgttttcatttcattttagtttaggttctttgggacagggtcttactctgtcgcccaagctggatgtgcagtagcaagatcacagctcactgcagcctctacatctccaggctcaggtgatcctcctacttcagcctcccaagtagcagggactacaggcatgagccaccgcacctggctaatttttgtattttttgtagagatggggttttgatatgttgctcaggctggtctcaaactcttggactcaagtgatctgcccaccttggcctcccaaagtgctgggatgactggcatgtaccactgtccccgacctgttttcattttattaattggctgattcatttagacacataatcatcaagtcaaatctcactctttccttagcatttcccttcagtttagcttagaatatctattcctattttaaaacacatatgattattcaagtgtggtggcacatgcctgtaatcctagctactcaggaggctgaggcaggagtatcacttgaacctgggagagtgaggttgcagtcagtcgagatcgccccactacactccagcctggatgacagagtgagactccatctcaaaaaaacaaaacaaaacaaaacaaaacaaaatgttttctccagatcatttttacatttaattattcagtctgctttaactataccttaatgtaaaaaattcagtaaatttaactcctacacactattagttaatgtacctaacacggtttattgaataagccagtccattcccaacagcatcaaaagtaattacatttcccaatgtaaattaatacagccattatggaaaataatatggagattcatcagaaactaaaaatagaattactgtatgttccagcaatccctcctgtggttgtatagctaaaggaattgaaatcagcaaactgaaaagataactgcactaccatattcactgcagcattattcataatagctaagatatggaagcaacgtaggaggccagcattggatgaatggataaagaaaatgtgatatatgtacacacacacacacacacataaaggaatactatccactctttattttatttatttattttttatttattttatttcattttattttggacgtagtttcactcttgttgcccaggctggagtgcaatggcatgatcttggctcactgcaacctccacctcctgggttcaagcgattctcctacctcatcctctcaggtagttgggattacaggcatgcaccaacaagcctggctaattttgtatttttagtagagacaggtttcctccatgtatgtcaggctggtctccaaatcccgacctcaggtgatcagcccacctcagcctcccaaagtgctaggattacaggcatgagccaccatgcccgatcttactatttgctctttatctttcctttgagatgaagtttccctcttgttgcccaggctgaagtgcaatggtgcgatctcagctcactgcaacctctgcctcccaggttcaaatgattctcctgcctcagcctcccaagtagctgggattacaggcacccgccaccatgcccagctaatttttgtatttttagtaaagagggggtttcacaatgttgctcaggcttgtctcaaacacctgagcttgagtgatccaccggtctcaggctctgaaaatgctgggattacaggcgtgagccacggcacccagccaaaaacacagatgagtgtattaatagtctgaagcactgtaaaatattgctgagaaaacagatcactaatatcatcattacagagcacaaaataagttctgctattattaggaatatcatagctctgactaacacatacttggaaaactcattctattagaaattaaattatactaatactattgacaatcacttttatagttgtcattgcaaactcaaagacaagaagtaaattcatcaccagaaaacataaaacaagtacttagccttactgctgagaagcctgtaattgcattttactgaatggcacctcagttcttgggataaaatttgaaacggcaactggaaggacagctttaactttaaaatggttttatttttagggttgtcatgttgtaaaagctattctcacatagctaagctgttggaaagagaccaggttttgtgaaagtttttcatcagatgtttcacgttgtcctcactgcaacctcaaacagtggcaaatgctttgtaagctgctgtaatgcaaactcagctgataaattaataaaattctgtttctttaggccgggcacggtgactcacatctgtaatcccagcactttgggaggccgaggcgggcggatcacgagatcaggagattgagaccattgtggctaacacggtgaaaccccatctgtactaaaaatacaaaacattagccgggcgtggtggcatgcatctgtaatcccagctacttgggaggctgaggcaggagaatcgcttgaacctgggaggcagaggttgcagtgagccaagattgcacaactgcactccagcctgggggacagagagactccgtctcaaaaaaataataatgaaaaatgaataaataaaattaaaaaaataaaattctccttctttaatgtcctaagccagaaaatatttgttaacattgctaacaggaatgaatggacgtgaatggaccacccaaagattctcctatttcagggtcaacttcaaagagaaaacatcaatttcacagtgtttcttgcttacccaggtcaagagttaccaatatcaagacatccaactgcacagagattggacctagagcagcaggagggcgtatacaaatcacagataccagacggaattgcgagagggagcagaaaaatgattcatctgtatcaggtgtggtctgcaagttgtaggatgtagaatatagcttgtggataaagagaattagaaaaaattaatgcccattcaagtttattttatgaactagccaaaagtcgcacatggatattcacagtaggtagaatgattagagcagaagtagcacttttggcacatagttattgggattgaaggggaattcattttagctttaactttaaaatagatttaattacttttattttaattaattattctaaagcttttaattttaaaaaagtttgtaatttttattttggcaaaatatacatagcataaaatttgccattttaaccatttttaagtgcatagttcagtgtcactaaatacagtcacctgattgtacaaccatcaccaccatccatcatctctagaagtttttctttttcagtttcccaaactgaaactctgcattctttaaacaatagcccttccttaatctcttttcccattaactgggaaccttcattctacttttggtttctatgaatattacatgctacatacctcatataagtggaatcaggcagtattagttttttgtatccagcttctttcacttagcattatgtcaaaatccatccatgctgtagcatgcgtccaaatgtccctttttaatgctaagtaatattccactgtatatctgtaccacattttgtttatccattcctctgtcaatgaatgcttccaccttttggctatcatgaataatgttactatgcacatgaatttgcaaatatctgttgaagtccctgctttcaattcttgtgggtttaaacccagaagtggacttgctgactcatatggtaattctatgtttcatttttatttatttatttatttatttatttatttatttatttatttgagatggagtctggctctgtcacccaggctggagtgcagtcgtgtgatctcagctcactgcgaccccccacctcccaggttcaagggattctgctgcctcagcctcctgagtagctgggattataggcacacagcaccacacccagctaatttttgtatttttagttgagatggggtttcaccatgttggtcaggctgatcttgaactcctgacctcgtgatctggccacctcgttgtcctaaagtgctgggattacaggcatgagccactgagcccagcctatgttccatttttttaaaatttaggaactgctgtactcttttccaccatgactataccactgtagagtccaccggtaatgcacaagagtttcgatttggctacatcctcaccaacacttattattccctggttttttgatgattgccatcttaatgggtatgaagtgctatcttattatggttttgatttgcttttccttagtaatcagtgatgttgagcatctttcatgggcttgatggccagttgtatatcttttttgggaaaatttctatgtaagtcctttgcctattttttaattgggttgtttatttattgctgagttgtaggagttctttatatattctggatattggtcccttatcaaagatattatttaaaatattttcttccattctgccggttgtcctctgattgcacaaaagttttaaattttgatgaagtccaatttacttatttttttgttttgttacttatgcttttggtgtcagaaagcttttagtttataattttaaatatattacgtctcctgcctcataagtaccactggacaaggtcccttttatgtactcagcttctgtcagaggtaaatgtattttgaagtggaggacaaagataattgcacaattggcatggagaactaaggtaattatgaaagttccagatacaaagagagagagctcaatatgccagcagttctctaccaatccatcctagaggtcttctcttgggattgcctaaataatgcaggggatggttgcaagatacacaagtgttccagaagcgtgtaaacaaggtacagagaaaaggatgagataaaataagatgatataagatattaggaaagccttgttcagaagattgcctacagaggcaaaagggacagtttcattttgctgagggaaacagggtggtaagaacacttgtggggaagacccccacttaccctgatacagagagaagctgtaaaataacttaatgggagagcattaggctgagatagttcccatggcctgggttcctacataggcaaaatgaaaagcttagcccatcaacaagtggcccgctgagtattagctgtgtaatgagagacctaccaccaggatacttcaaataatgcaactgcccaaatttttgccaatcaaataatttctctactctacttctatattcaccctataaaagccttccctacaaacacctccagtagatcctccaaccactttcagtttggagctgcctgatccatgaatctctgtttgctcaaataaactctttaaaaatttaatatgcttaagtttatctatttttttctcatttttaaaaattgaaatgggatcttcctgtgttgttcagcctggtcttaaactcctgaactcaagggattcacctgtctcagcctcctgagtagctggaattatagacgtgtgcctccacacccagcttacatttatctttaaacaagggtttgacccctttctgaaatatatttgtgtgaagacctgtaccctcagtgatatggcaagctcattttagaccatcgagcacttttgtctctggaccacaatttgccctttgtgacctgctctcctaaaaaattcaagtgtaattcaagttagtttaccctctgctgatcaggggaggttgatctaggtgcaagttcaagacaggcactcactccttcattcataccccaaatctcagcatcacacaatacacccatgtaataaacctgcacaggtaccctccagaatctaaaatgaaagttgaaattcattaaaattgtaatttcatcttattaaaaaacaaagataaatttgcttctttccaattttgatatatattatactgacatacacactgtattctatggtgaattatatcgattgaatttcacattttaaactaacactgagttactttgagaaactctgttgggtcataatgtgttatgtttttaatatattttaatacaatttgcaaaaattctgttttaaaattacatctatgttccataaataaataaatatgtaaaaaataataaatgtttatattattcaagtgaagattatagcgatctttttgaatatctacttaacctcagctagctttaaattcagaagtagcaactccatagaaattcaacttatttctaccttattactcatacttgtctccttgaagaagcttcattgctgtcatccagtttagactgggatgtcataaatctctagactgagtagtataatattcactattaaaataaaatcaaattattattataatgttatgacacctccaaatacaaaaagcaagcccatggatgttaggttaaggtatagagacaagtattcctacttactatcttttagggcagacatatcccagccaaggtgattgcaaaatgaaatggaaactatatggtggaaggggacttgagactcacacagattggattttcattccaaccctcacatacacaagctgcatgactctgggttgattgcatattctcttagattttcaatttcttcgtctgtacaatggaggttaatgcctatgggctacggctgatgtggggataaaagaaccaacagggatgcatgggcagggcctggtccatggagcagctggcatcaacaaatggaagctccttcccatcttgtatttgtgtgcactacaaaatccggaatatgtgggtataaaaagtacctttataagagacataattggaaacttttgcaaaaagagtttggaaaggtgtcacatcttgtggcatgaggagttgtgggcatacacttgaactttgtgctgtgagatatccacagaacttcagtagcttaagagaacagtttagatgtcatcttattcatctaccatagaacttcctctttttttctgagatttctagacaataacttttacagctctaataatgcagttctctcccagttgtttggactattctaatagatacaaagcagtatttcaccagcagatgctactgcagtttgtatgatgatttcaaactaagaatccatttaaagttatgcaatacttttttggaaatagagtgaaagtactttaagtttaaaatcctataaaataggtttacagtaaataattatctgttgcaatgtctatcatactatcttatattcacacatgtgttggtgtcctaatacatatgtatgagagtgaaagttacctgaggtcagagactctgccatatgttccctgcaccactgttgcctatctcagcacatgatatacagtagatgctcaataaatactttaacttaaaaaatgcactaagaataaatcttattagacatcaaaatatgtacgagtacaatctagggacatggtcaggggctcaaaattcaatcttatttatttatttacttatttatttgtttatttggagacagagtctcactctgtcacccaggctggagtgcagtggcacgatcttggcttactgcaaccttcgtctccccggttcaagcgattctcctgcctcattctccagagtagctgggattacaggtgcacaccaacacacctggctatttttttttcgtatttttaatagacagagggtttcaccattttggccaggctggtctcaaactcctgagctcaggcagtctgcccacctttgtctcccaaaatgctgggattacaggtgtcagccaccacacagccacaaaatgttttaaagtagcttcaaaagccctttgcaaataggtgttttcataacaagatgaaaacaagaaaacattgagcttcatataatagaagggttctgcctggatttgcatgtggccccatcatttgtttgctgttgggccatggtcaggttacttagctgctctctgcctccacataggctttatgcctgtgcatccttcatctacaaaatgggaataataagaacatctaacaattagaagtggagaaaatatatgtaaaggtctttgaaaagagcttgtcaaagctcaataattgtcagctatcattcaataataatcataatcataaaaatatatgactcaaagaaagattgctacctcatatccagcttccccaaagaatatcagacattggacctgtgaaaggaatgacattgagatgtattttcacatcgctaagttggttttttctctttgccattcaatttctgcagtccccactctaagtccatggtccacctttttatttttcctcctaaaatgtcttcacttcttgtaaaatttacttttccttaaaaagggcccttttcatcctctcactcttttgcccttcccagaagttggttaatgggcccaaaaatacagttagatggaaagaacagaagaatttctagtgttcaatagcacagtagggtgatgatcattaacaataacttatatatttcaaaatgactagaggaaagatgtggaatgttctcaacacaaataaatgataaatgtttgaggtgatggatatgcaaattatcctgatttgatcactacatattgtatgcatgtatcaaaatatcacatgtaccctagaaatatgtatcattgtcatgtatcaataaaaacagaaaggcctatttctctttccttcctccccgcattccctgctgccccagatatgtgttgttcctggtgctctcctaccccacgttcagtcagcactgagccagcaggaaggatctcacagatcatatcctgagatcaaccctttcaggtaataatcctcctgcttttagtcatttatatcctttggttcgtatatattttgagtcaaatgccttctaactactgacttacataatatcccttggtttttaaagataatacaaagtggattttagtaacaatcttgagtcgtcacagaagctaatgaagttggggatgccatgaagccatccaagcatatagagcccatttccctgggtcccttttccttagctcaaggccacaaaaaatcagaacttgaattccagcccacatttgcattatgtctaaataactatgagttataaatgaagctaacagttaaatatattctattctcctacttcgataaatataccgccataattacccacaacgtcaaagtcgagtgtagaattctctgatttcttggtgctctgcacgggaatgtggtagtaaagggagagctgatcctcagccccaagctaaacttttttctttcatcgtagctagccctgtactctcttgagaagccttgtgtacccctgtatgggggactccctaggccccatgcaagctccatccacaattctcaccccttcagacagcagagccttgggcaccatttggacaagcacagtttgcgctttgaaatggacccagagaagaggccatgcaggctcagacacatttggccaggagcctgagtccccagtgtgtgccctagaagagagggtgagagctctgggtgggccagggtacagtcagtggagggccagagaggcaccttctcaagcgcaggattcagggcaggagtcctcttgcccagatggaaggctatgactgcttagtgcaatggcgcctgcgtcatgtcttctcagttcacctttcattcagtctctgccaccgtgggaagttccatggaagcgcaggcttcccttgtgctgccagccaactcaaactacactttctgccttagggcatctccattattgtaggatttttcctgagcacaaatacagcccagaaacacttgcaggttaacagcctcaggggaagacctcaaccagtgtgggacaggtgggcaaatgctccaggctcatgtttcaggtggacagttctggataactttctggagcctctcagaaggtcctgcagaaaaaactgcatggcaggagcctcaatagcaagccattattttgacttttctttcttgcctgtctcactcttcccacttctgactcctgcttcttggaatcacttcccaaataaaccacccacacccaagtccttactccagctctgcttttagggatacagacacaccttggagatattacacgttctaggtaaccacaatagggcgaatatcacaacagtgcaagtcacacgaaattttttgcaagtcacacaaaattttttgctttctggtgcatataaaagttatgttgccaggcatggcggctcatgcctgtaatcccagcacattgggaggccgaggtgtgtgcatcacctgaggtcagaagttcgagaccagcctgaccaacatggtgaaaccctgtgcctaccataaatacaaaaatggtggtgcgtgcctgtagtcccagctactcaggaggctgaggcaggagaattgtttgaacctgggaggcagagtttgcagtgagccaagattgcaccactgcactccgacctgggaaacagagccagacaccgtctcaaaaaaaagttatgtttaaactactgtagtcaattaagtgtgcaatagcattatgtctaaaatacaatgtatataccttactttgaaaatatgtgattgccaaaaaatgctaaccatcatctgggccttcagcaagtcatcattttgctgctggatggtcttgcctcaatgttgatagctactgactgatcggggtggtggttgctgagggctggagagggagtggcgatttcttaaaataagatgacaatgaagtttgcgcattgactgactctttctttcacaaaagatttcactgtagcatgctatgcagtttggtagcattttacccacagtagaatttatatcaaaattgcaaccaatcctctcaaaccctgccactcctctatcaactaagtttatggaatattctaagtcctttgttgttctttccacaatgttcacagcatcttcaccaggagtagattccatcccaagaaaccaatttctttgctcattcataacaagcaataataatacattattttatacataatatatataattatataatatacatattatatatttattatattatatattataatatatataatatgctataatatataatatgtaatataatataagcaaaaataatatcgcttggtttttaaagataatacaaagtggattttagtaacaatcttgagtcatcatagaagctaaagaatttggggattccatgaagccatccaagcatataaagcctattcccctgggtcgcttttccttagctcaaggccacaaaaaatcagaacaagaattccagcccacatttgcattatgtccaaataattatgagttataaatgaagctaacaaatagttaaatatgttctattctcctacttcaataaatatactgccataataacccacaaggccaaagtcgagtgtagaattctgattccttggtgctctgcacaggaatgtggtagtaaagggagagccgatcctgagccccaggctaaacttttttccatctaattccatttatttccattaagattgcagcaattcggccaggcacggtggttcatgcctgtaatcccaggctgaggcggacggatcatctgaggttgggagttcaagaccagactaaccaacatggtgaaacaccatgtctactaaaaatagagaattagccagatgtggtggcacatgcctataatgccagctactcaggaggctgagacaggagaatcacttgaacccaggaggcggaggttgtggtgagctgagatcatgccattgcactccagcctgggcaacaagagcaaaactccatctcaaaaaaaaaaaaaaaaaaaagattgcagcagttcactcacatcttcaggctccacttgtaattctagttctcttgctatcttcaccacaactgtggttacttcctctgctaaggtcttgaacccctcaaagtcatttatgagggtcagaatcaacttcttacaaactcctattaatgctgctatttttacctcctctggtgaatcataaatgttcttagtggcatctaccatagtgaatcctttccagaaggtttccaattgactttgcccagatccatcaaaggaatcatgacctatggcagtaacagccttataaaatatatttctcaaataataagacttgaaagtcaaaatgatgcctcaatccattgactacagaatagatgttgtgttggcaggcatgaaaccagcatgcgtttccctgtacatctccattagagctctttagtcaccaggtacattgtcaaaaagctgaagtatttgaaatgaatcttttttctgagctgtaggtctcaacagtgggattaaaatactcagtaacccatgtggtaaacagctctgatatcatccaagtgttgttgttccatttatagagcacaggtagagtagatttagcgtaattcttaagaggtgtcctaggatttatggaatggcaaataagcattggcttgtaacaagaaagtcagcctgtcctttaaatcttttttatttttcttgagataatgtctcactccattgcccaggctggattgcagtggcatgatcttggcccactccagacttgacctccttggctccacaatcctcccgcctcagcctcctgagtagctgggactagtagcatgcaccaccatacatggcttatttttatttatttattttgttagagacagggttcaccatgttgcccaggctggtctcaaactcctaagctcaagccattctcccacttcagcctcccagagtgctgggattacaggcatgatccaccctgcatggcctctaaattcgtgttatggagactcattttcatggttaaaatatcctgaattgactgtggcctgttgggaggtgggatggagggagctacttaaggaaaatgaaaaagaaagggaagcacaccagaagcaagaaagtgtcatcaatttttacatcaaggactccatgataaagagaaagtacaggtggcctgttatcatggctgaccattggactgtggactgcacctgcatctaccaggttcttctggataatcccagttttaaatttttgacctgatattcatgaacacagtgctactggtcagacctttgtccaggtttaagcttcagaacataatgtcttcatgcagtgggaggcctggttagggttatgattctgccctgggacatctgccccttctgacctggaggtaaatttgtcatctactatttacctccacacttgaacagccaatgatgggctgagcacagaggctcacatctgtaactctagcactttgggaagccaaggcaggaggatcgcttgaggccagtagttcaagaccagcatgggtaatatagtgagacctggtctctgtaaaaacaaacaaacaaacaaaaccaaggatggtgggtggcagggagcagttcaacatgggaaaccattaacctgagagctagaaggacccttaggccagcccccattaatagatgagactctgccctgagattatagtccaaggtaatgcattgagcttttctagaaatttgaaaataatcaatcctaaaacccccaagcatactgctattgtttgctattgaataatgttttctagtctgggtgtggtggcacctgcctgtaatcccaacactttggaagatccaggcaagtggatcacctgaggtcaggagttcgagatcagcctggccaacatggtgaatccccgtctctacaaaattacaaaaaattagcaagccatggtggtgcatgctggtaatcccagcttcttgggaggctgaggcaggagaatcctttgaacctgggaggcagaggttgcagtgagatgagatcatgccattgcactccagcctggactacagagacaaattccatctcaaaaataataataataatgttttctacaagcaaggggttactttatactgggaactggtgtgaagggattcaccatgtgtaagcttttggattgatgacagttatttctagatcatggaggtgggaatgcttgttgatcatcttctatgttctttgttatattgattgattttttaaattagcatttttataacaataaagtcataaaaacaagtaactaaaataaagtaaaataatctaaaaaggccaagcatggtggctcatgactgtaatccaagcactttgggaggctgaggtgggtggatcacctgaggtcaggagtttgagaccagcctggccaacatggtgaaacctcatctctactgaaaatacaaaaactagccgggtgtggtggcaggcacctgtaatcccagctactcgggaggttgaggcaggagaatcacttgaacccaggagaagctgcttgcagtgagctgagattgcaccattgcactccagcctgggtgacaagagctaaactctgtctcaaaacaaaacaaaacaaaacaaaaatctaaatgtaattgagttgaatatttaaacttttaactgacatttcaaattagattctaattccatttaaaagagcatctcatagaagcaaatgtactcaattatattaactctgtggtttcatttaagcaatttgttttgtgaagggacacaaatccaaccagattttaacagtgtataaatatgtatttattaatttaattacaatgacaatactctcaactccccatttgaataaaggagagcgtgtgatctgtgttctgagacagtgtgcactataggtgtgtggaaataccgatgccctcagctgtgtggtaggctcagtgggacctggagtgcaggagcccctgggccattcacctctggccacaaaagtcattgctcatttacacccaacttctatagaaatattattttcagtggttgttatgatgcaaaagaaaagaagcagggagatttattaaactgttacatataagttatgttagtaaataaagtctactttcttctggcttaactaaaaatctatactagtatttatgtcttttggaaattagagatgccaatttaagtattatgaagcaaagcaactgattattaggtaagacagccaagtacaactgcagaattgtagaggttatgggttacatgtataagaatatttcatagcaaaaatcttttaagactctgtgaagacactccacagtgaagcagaaattagaacagaattaataatactgtgtatgctctcagttcaccaatttatcaaaactagctttatgattcagaagggtgtctgcacttttgcaattggaagaaaagaaagaatattttattttttgactctttagattttcttcactaacagtatttccaaggctaagtaagggagttgcaagtaacaccaagagaaaaaagcagtcttgagcagctttttaaaaatagtcttaaaatatggaaaatgaagccaggtgtggtggctcactcttgtgatcccaacactttgggagcctgaagtgggagggttgcttgaggacaaaagtttgagacaagcctgggtagcatagcaagatccccatcattgcaaaaaataataattttaaaaaaaattatctggatgtggtggtgcatgccttagagtcccagttacttgggaggatgaggtaggaggagctcttgagcctaggagttcaagtctgcagtgagctatgattgcaccacagtcctcaagcctgggcaacaaagtgagactctctctctctctctctctctttatatatatttatatatatataatatgtggaacccatatatatatggaaaagggaaggggccaagaatatcaaagacattattgaagaagaggaaagattcgtcctgccaaatatcagaacttttataaagctacaacaattaagacagtgtggtcttcactgataaactgactaatgaaacagaatagagagctcccaagcaaatctccacaaatttaatcttcgatatgtgatgtaggtgacatggcagatcagcaaggaaagaaaggacttttcaataaataggatagaaaaataatggttattgatgtaggaaacaaaatgaaattatattcctacttcactctatatacaaacattaaattccagatggacagaagacttacatgtcagaaacaaaactttaaaacttttagtagaaaatgtaagtgaatgagacacaaaaagccacttaacaattaaaaaagattagacattttgactatcacaaaattaagaactttttacatcaaaattggaaagatagtctgggcatggtgtctcaaacctgtaatcccaacagtagatcacctgaggtcaggagtttgaaaccaggctggccaacatggtggaacctcatctctactaaaaatacaagaaattagccaggcattagtggcagacacctgtaatctcagctacttgggaagctgaggcacaagaatcgtctgaacccgggaggtggaggttgcagtgagccactgcactccagcctgaataacagagtaagactctgtctcaaaaaaaaaaaaaaatagaaattaaaaaataaaagtaaaaaagtgaaaagataaactataaattagaagaagttatttgcagtacctaaaacctacaaaaggttaatatcatatcaactaagtgctcatatgaattatttttgaataaggagctcctatgaattaattttaaaaatagcaaaccaacagaaaattgggaaaaggcattaatagggatttcacaaaagagaaagcccacaaaatataaaaattttctcaacctcattagtaatcagaaaaatgcccaagatactacacatctattctctccacaaatattgagaagtttgatgataccaaatgtattagtccatattcacactgctgataaagacatacctgagatggggaagaaaaagaggcttaattggtttaagggctccacatggctgaggaagcctcagagttatggtggtggatgaacagcacttcttacatggcagtgacaagagaatatgagaaggaagcaaaataagcaaaaaacccatcagatcttgtgagatttattcactatcacaagaatagcatgggaaagactggccccaaagattcaactacctccccctgggtccctccccgaacacatgggcatcctgagcaatacaattcaagttgagacttgggtagggacatagccaaaccatattattctgcccctggcccctccaaatctcatgtcctcacatttcaaaacctatcatgccttcccaacagtcccccaaagtcttaactcatttcagcattaacccaaatgtctgctgtccaaagtctcatctgaaacaaggcaagtctcttctgcttatgaccctgtaaaatccaaatcaagctagttacttcctagatacaatgggggtacagatagttgagaaaatacagctgttccaaatgggagtaattgtccaaaacaaaggggttacaggccctgtgcaagcccaaaatccagcaaggtagttaaattttaaagctccaaaatgatctcctttgactccatgtttcacatcaaggtcatgctgatgcaagaggtgggctcccacagccttgggtagttctgcccctgtggctttgcagggtataacccacctcctggctgttttcatgggctgatgtcgagtgtccgcagctttcccaggctcatggtgcaagttgtcagtgaatctacaattctggggtctggaggagtgtggccctctcctcaaagctccacgaggaagtaccccagtagggactctgtgtaggggcttcaaccccacatttcctttctgcacagccctagcagaggttctccatcagagcatcacccctgcagcaaatttttgtttggacatccaggtgttttcatacatcctctgaaatctaggtggaggtttccaaacctcaattcttgacttctatgcatgtgcagactcagcacaacgtggaagctaccaaggcttggtgcttgcactctcaaggccatggcctgagttctatgttggcccctttcagccatggttggaggggctgaaacacagagaaacaaggctctatgctacacacagcacagggaacccggcccagcccagaaaaccattttttcctcctaggcctccaggcttgtgatgggaggggctgctgtgatgacctgtgacatctcctgtagacattttccccattgttttggggattaacattcagcttctcgttacttatgcaaatttctgccaacagctggaatttatcctcagaaaatgggattttcttctctatcacattgtcaggctgcaaattttccaaatttatatgctctgctttctttataaaactgaaggcctttaatatcacccaagtcacctctggaatgctttactgcttagaaatttcttccagcagataccctaaattatcactctcaagttcaaagttccacaaatctctagggcaggggcaaaatgctgccattctctttgctaaaacacaacaagagtcacctttgctccagttcacaacaagttcctcatctccatctgagactacctcagcctggaccttattgttcaaaacactatcagcatttttgtcaaagccattcagcaagtctctaggaggttccaaattttcccacattttccagtcttcttctgagccctccaaactcttccaacctctgcctgttaccaagtttcaaagtcgcttgcacattttttggatgtcttttcagcagcatcccactccactggtaccaatttactgtattagtctgttttcacactgctgaaaaagacatacccaagtctgagaagaaaaagaggtgtaaagaaaaagaactgtaattggatttacagtcccacatggtggaggaggcctcagagtcatggtaggaggtgaaaggcacttcttacatggcagcagcaagagaaaatgaggaggaagccaaagcagaaacccctgataaacccatcagatctcatgaggcttattcactatcacgagactagcacaggaaagactggcctccgtgattcaattacctcaccctgggtccctcccataacatgtgggaattctggagatagaattcaagctgagatttgggtgtggacacagccaaaccatatcaccaaatatggagagactgtggatcaacaagatcatctcaaactaatacaggaggtgagagtttaaattagaacaaccactttggaaagaaatttggattatcttataaatttgagcattctcatatgttatggcaaagtaattcctctaccataggccctggagaaactcttgcccatatgcaccagaagtagtaaaaaaataaatgctcatgtaatgccattcataatagcaaaaatctagaaataagccaaatgttcattaataggagaatgggtaaactgatagaagaatgggtaaataaattatacccttaaaaactaaataatatgtcatttaaggcaatcatatgtatgcaataaaacaatgtttttttaaaggaagggaatcctaaacataaattcagggtagtagttaccctcgggctgaagggtgaaaatcaggaaaaaggacagaggaggagcagatgttagggtcagaaccctagttcttgggttcataagtgattaccatattgttcaaatacatttactcagaggcccaggcacagacaaggatgaaataggagccaaggtatgctatgagccaaggattatgattaatccaattttgtgcactttaagccatttgaaaaacagaaaagcaaaacaacaaaataatttttaagaaattgaatatagggtgttttgctctgaatgtgtccccctaaaattaatcaccaatgtcataggattaggaagtagagcttttaggtagtgattccttcatgaagggagagtcttcacgaatgagtttaggatccttacacaaggattggagggagtgggcttcccctgttttgcccttccgccttctgccatgtgaggacacagtgcatctcctcctgaagacacagtgcagaagataccatcttggatgtagagaccaggccctcaccagacaccaatcctgctggcaccttgatcttggacttctagcttatggaactgtgagaaatacatttctgttcttcagaaattacccagcctagtgtattttttatatagtagcagaaactcattaaggcataatgcctcttgtcattttcttctacaattttctttgctgcctctttagcactggggcattttatatttgatccttcatcatatctcttacttttggtttttcacatttctgttccaagtgtattcttagacacatattttccaatatttgttagcatccaggtcagaaagtccagaataccttcttttaaggcttccgtttctgcaacaatgaagtattaacgcctcctgtaaactaggtatttcctttccaattgtaactgccatctggaggcaaagtagaattctagtctatgagtgtggggttgatttttaatgtatctagagtatggtaaaatgctggtttttaatcacacagatacattgattgcttggcacactagggtaccagttgctagttatctctgtattgatccatgctgttacagagggaaagtacagaccatgaagttggaccagctgtcatacccacaacatttggggagctttgattttttttaacctttagctgcttaactgtcacatctagaagctcaggtgaaaagcacccttattgtggggactttcccttagtgctctgtggcactaaagagcagacctatgtagaagcatttaagtattttgtgcatcaacaggaaaattaaaggaacaaattcttattgtatcctttagtccctgacgacaaaaccacagtgacagtaactaggtcatggcattgtattcagagagggtcagccttggtatttgacagtgagtcccctgtaccccactgtcaagactcactgagcagacgggaaagttcaggtggaacatgcagtaaagagcaaacacggtggggggcgctcactgtcatacactgccatgcctgccacggtcagcagacctgtcttctatttgacaacaggcaagttgagaaacatttttttggagagtttcttgattcttcccagttgtggcaggatggactgacttagaggagctcaggaaggttgttaaacaacacagaaacgcaacatgaattgtactcctcagcaggcctatgttagagcagcaggtccttgaagcctcagccactcctgggacacagcataatgcccctaatgatttcaaatttggtggagagtgggctgctaatcccagtgtccagggacaaaaagagacataaacagcaaaaagttataaaataagtgggcctaacatctgcttattgtgggaggtagggatttaaggtataagaatttagctgcatgtggaagctcacacctgtaatctcagcacttgaggaggtcaacgcaggaggacagcttgagcccaggagtttgacaagagccaggaaacatactaagtccgcattcgttcaaaaatgttttgaagaaaagtagttgagtgtggggacacatgcctgtagtcctaggtacgtgggagcctgagacaagaaaattgcttaagcttgggagattgacactgcaatgagctgtgatcacaacaatgcacgccagcctgtgagtccggagacccgaaccagcacccttaagcagggtccacctccacctgtagaaatcggcccaaggaggtcctgaggaaaggactcccgggagtccggctctggggggcccgaagccccactcccacaacgccccctactacatcccagctcaagcaaacaccgtgactgccacaaaaacccccgaccacacatcgcaaaacctgtttaaaggagccacagccggactttgaagagcaaagcccgactccgcatgggaaatgcaaatgcgcgaggcgccagcccattctccagtcacagtgactccaacagttggctgaggaccactccttaaaccttatcaaagcaagagcactttcggacagtgcgtcggtgttgaggatctagcatgaccaacccagggggtcgaaaaaacagtttcaggacaccacgatacactgagggctaaccaggaagcagaaagaacagacggagtcctgtgaaagaagcgcaacatcccagactcaggcctgcccggacggtgttcgggtgagtctccccagaagtcgtgcccgtgagatctccaggacaggactgccagcgtgcccgggggctattcgctcacacaagtttcgttcccgacgagagcagaacccggcagccacaggggttgcctgggggccagtatttctatgccacccctgtaggactgtgggtgggggtgtccaccgtgactggatgtgtcttctaggaaacgacagtcttgaagaggaagccgggaatgggagatggcaacaatccccgtccctggaacgccggcctctctggacaagccacccgcttcgcacccctcctcttatgcccgtggcggtggcacggcgctgtatcctgcctgggctatggcctctgctctgtcgtccctcttgctctgtctcccctgtttctgagcggcctagatgcctctcggtctggctgaatatcttctacgaagatcacttccccgtccatcagggagacacttcctggagatccgtgtcatgactgtttctctctccaagcctgtttctgctggattgcgcaggtctgatgaccctggggctcttggcttccatacgtgtctcagacagggaagcttcctcggtctccgtgtttcacctcatgggtgggtggattgcctaggatgagcgagcgctaggccggcgagactggccttgtcttctaggacaagtgcatttcccctgcgcttcctgtctcactcttgagggacatcctctcctccgctcacaggtggacagactccctggatcgtttggctgtaacgaatgtcaggaaacaaagggactgcgctgggactggggctggggctgcgtgcaggggaggttgcgtcagggctagctgggtggtggagggttgggggtggggtgactgttgcagaaacctctgtggtcctctggcaggcatttcaacatgtggcttggctgaggcacaagccccgtccaggttcccaggtcttctttgtgttcccttggcactcagggaaaggcgacttgatcccctttctaccgggcgcatgcctgggcaccactgttgctttcgccctcgccccacatgcctccgttgacatacattcacgccatctgctctggtatacgccagtgccaggcgtgatcgcattgtctccacctgggattcgccccgtccctgtctgcacgtgtcctggaaagcggtgtcggctcgcaggagccccagggcttttagaagcgggccaggccactgctctttcaaaggaggagggaggcagagggctcacggatcagtgaattttccgctgacagcaggccttgagggccatgggatcattctgtgctgcagcgaggccctgcctgcctcagcagatgtggtgagcccatcctttctcgcccagagtggtccaaaatcgcatctgaagaggagtcctgagaacccagcaggcgccctgaagctccccgtccatcggtggaagtcggctcaaggaggtcctgaagacgggactcctgggggctcggccctgggacacccgtggccccctctcccacgcggccccaaactggaccccggatccagccgcagccgcggctgcagcaggcgcgccccctgccgccgcgcagccgcccgtatttaaaggggacgcagcctgcctgactgccagcagccaagcgcgagtcggcccagccaaagcgcatgcgcgaggcgcgcgccgctttttgcttcacagtgcttcccacggttgtcttaggaaccagtccccgaggcttggcaacgcgggagccctccgtggcagcgcttgggtgtcgggcctccgaggctccggcctgacctctccacggggtccacaggaacgtctccggctgccaggagtcgcaaggggccgagcaggatgaggaaaccacaggcggagtccgggggaagcagcgtggcgtcccagcctcaggcctgccaggacggtgttcgggtgagtctcccgagaagtcgtgcccccgtgatctcgaggacaggtccgcctgcgtgcccgagggctgttctctcagccgagggttgttcccctccagagcagaacccggcagccgcaggggttgcctgggggcgtgtattgctcggccaccgcggtaggactgtgtgtggggctgtgtctcccattctcccttctctctctgtctctcaccctctgtgtgcttctttccctctgtgtgtgtgtgtgtgtgtgtgtttgtgtgtgtgtgtgtgtgtctttggacgaatgtgccctgtgcgtcaaaaagggatgtcttttatgtggaccggttttggtgagcctctttctgcgtctctccctgggtcctgcggccagctgtccatcgtcttcgcggcggttccactttgggtctgtgcaggcctcgataacgtgaggggatgcatcgggcccggagcaatggaagtctcatccccatcctgagcggcctcttttctaggatcgagaggaccacactgcagcccaggacaaaagccccacggtagcacattgtccggcaggagaggagcagacccacgtccaagaagatggttttacctttccacgccccttctctgcgaaatgaagccacaccaccacacagtcttgaagaggaagcctggaatgggagacggcaacaagccccgtccctggaacgctggcctctctggacaagccacccgcttcgcacccctcctcttatgcccgtggcggtggcacggcgctgtatcctgcctgggctatggcctctgctctgtcgtccctcttgctctgtctcccctgtttctgagcggcctagatgcctctcggtctggctgaatatcttctacgaagatcacttccccgtccatcagggagacacttcctggagatccgtgtcatgactgtttctctctccaagcctgtttctgctggattgcgcaggtctgatgaccctggggctcttggcttccatacgtgtctcagacagggaagcttcctcggtctccgtgtttcacctcatgggtgggtggattgcctaggatgagcgagcgctaggccggcgagactggccttgtcttctaggacaagtgcatttcccctgcgcttcctgtctcactcttgagggacatcctctcctccgctcacaggtggacagactccctggatcttttggctgtaacgaatgtcaggaaacaaagggactgcgctgggactggggctggggctgcgtgcaggggaggttgcgtcagggctagctgggtggtggagggttgggggtggggtgactgttgcagaaacctctgtggtcctctggcaggcatttcaacatgtggcttggctgaggcacaagccccgtccaggttcccaggtcttctttgtgttcccttggcactcagggaaaggccacttgatcccctttctaccgggcgcatgcctgggcaccactgttgctttcgccctcgccccacatgcctccggtgacatacattcacgccatctgctctggtatacgccagtgccaggcgtgatcgcattgtctccacctgggattcgccccgtccctgtctgcacgtgtcctggaaagcggtgtcggcttgcaggagccccagggcttttagaagcgggccaggccactgctctttcaaaggaggagggaggcagagggctcacggatcagtgaattttccgctgacaccaggccttgagggccatgggatcattctgtgctgcagcgaggccctgcctgcctcagcagatgtggtgagcccatcctttctcgcccagagtggtccaaaatcgcatctgaagaggagtcctgagaacccagcaggcgccctgaagctccccgtccatcggtggaagtcggctcaaggaggtcctgaagacggaactcctgggggctcggccctgggacacccgtggccccctctcccacgcggccccaaactggaccccggatccagccgcagccgcggctgcagcaggcgcgccccctgccgccgcgcagccgcccgtatttaaaggggacgcagcctgcctgactgccaggagccaagcgcgagtcggcccagccaaagcgcatgcgcgaggcgcgcgccgctttttgcttcacagtgcttcccacggttgtcttaggaaccagtccccgaggcttggcaacgcgggagccctccgtggcagcgcttgggtgtcgggcctccgaggctccggcctgacctctccacggggtccacaggaacgtctccggctgccaggagtcacaaggggccgagcaggatgaggaaaccacaggcggagtccgggggaagcagcgtggcatcccagcctcagggctgtcaggacggtgttcgggtgagtctcccgagaagtcgtgcccccgtgatctcgaggacaggtccgcctgcgtgcccgagggctgttctctcagccgagggttgttcccctccagagcagaacccggcagccgcaggggttgcctgggggcgtgtattgctcggccaccgcggtaggactgtgtgtggggctgtgtctcccattctcccttctctctctgtctctcaccctctgtgtgcttctttccctctgtgtgtgtgtgtgtgtgtgtgtttgtgtgtgtgtgtgtgtgtctttggacgaatgtgccctgtgcgtcaaaaagggatgtcttttatgtggaccggttttggtgagcctctttctgcgtctctccctgggtcctgcggccagctgtccatcgtcttcgcggcggttccactttgggtctgtgcaggcctcgataacgtgaggggatgcatcgggcccggagcaatggaagtctcatccccatcctgagcggcctcttttctaggatcgagaggaccacactgcagcccaggacaaaagccccacggtagcacattgtccggcaggagaggagcagacccacgtccaagaagatggttttacctttccacgccccttctctgcgaaatgaagccacaccaccacacagtcttgaagaggaagcctggaatgggagacggcaacaagccccgtccctggaacgctggcctctctggacaagccacccgcttcgcacccctcctcttatgcccgtggcggtggcacggcgctgtatcctgcctgggctatggcctctgctctgtcgtccctcttgctctgtctcccctgtttctgagcggcctagatgcctctcggtctggctgaatatcttctacgaagatcacttccccgtccatcagggagacacttcctggagatccgtgtcatgactgtttctctctccaagcctgtttctgctggattgcgcaggtctgatgaccctggggctcttggcttccatacgtgtctcagacagggaagcttcctcggtctccgtgtttcacctcatgggtgggtggattgcctaggatgagcgagcgctaggccggcgagactggccttgtcttctaggacaagtgcatttcccctgcgcttcctgtctcactcttgagggacatcctctcctccgctcacaggtggacagactccctggatcttttggctgtaacgaatgtcaggaaacaaagggactgcgctgggactggggctggggctgcgtgcaggggaggttgcgtcagggctagctgggtggtggagggttgggggtggggtgactgttgcagaaacctctgtggtcctctggcaggcatttcaacatgtggcttggctgaggcacaagccccgtccaggttcccaggtcttctttgtgttcccttggcactcagggaaaggccacttgatcccctttctaccgggcgcatgcctgggcaccactgttgctttcgccctcgccccacatgcctccggtgacatacattcacgccatctgctctggtatacgccagtgccaggcgtgatcgcattgtctccacctgggattcgccccgtccctgtctgcacgtgtcctggaaagcggtgtcggcttgcaggagccccagggcttttagaagcgggccaggccaccgctctttcaaaggaggagggaggcagagggctcacggatcagtgaattttccgctgacagcaggccttgagggccatgggatcattctgtgctgcagcgaggccctgcctgcctcagcagatgtggtgagcccatcctttctcgcccagagtggtccaaaatcgcatctgaagaggagtcctgagaacccagcaggcgccctgaagctccccgtccatcggtggaagtcggctcaaggaggtcctgaagacgggactcctgggggctcggccctgggacacccgtggccccctctcccacgcggccccaaactggaccccggatccagccgcagccgcggctgcagcaggcgcgccccctgccgccgcgcagccgcccgtatttaaaggggacgcagcctgcctgactgccaggagccaagcgcgagtcggcccagccaaagcgcatgcgcgaggcgcgcgccgctttttgcttcacagtgcttcccacggttgtcttaggaaccagtccccgaggcttggcaacgcgggagccctccgtggcagcgcttgggtgtcgggcctccgaggctccggcctgacctctccacggggtccacaggaacgtctccggctgccaggagtcacaaagggccgagcaggatgaggaaaccacaggcggagtccgggggaagcagcgtggcatcccagcctcaggcctgccaggacggtgttcgggtgagtctcccgagaagtcgtgcccccgtgatctcgaggacaggtccgcctgcgtgcccgagggctgttctctcagccgagggttgttcccctccagagcagaacccggcagccgcaggggttgcctgggggcgtgtattgctcggccaccgcggtaggactgtgtgtggggctgtgtctcccattctcccttctctctctgtctctcaccctctgtgtgcttctttccctctgtgtgtgtgtgtgtgtgtgtgtgtgtttgtgtgtgtgtgtgtgtgtctttggacgaatgtgccctgtgcgtcaaaaagggatgtcttttatgtggaccggtctttggtgagcctctttctgcgtctctccctgggtcctgcggccagctgtccatcgtcttcgcggcggttccactttgggtctgtgcaggcctcgataacgtgaggggatgcatcgggcccggagcaatggaagtctcatccccatcctgagcggcctcttttctaggatcgagaggaccacactgcagcccaggacaaaagccccacggtagcacattgtccggcaggagaggagcagacccacgtccaagaagatggttttacctttccacgccccttctctgcgaaatgaagccacaccaccacacagtcttgaagaggaagcctggaatgggagacggcaacaagccccgtccctggaacgctggcctctctggacaagccacccgcttcgcacccctcctcttatgcccgtggcggtggcacggcgctgtatcctgcctgggctatggcctctgctctgtcgtccctcttgctctgtctcccctgtttctgagcggcctagatgcctctcggtctggctgaatatcttctacgaagatcacttccccgtccatcagggagacacttcctggagatccgtgtcatgactgtttctctctccaagcccgtttctgctggattgcgcaggtctgatgaccctggggctcttggcttccatacgtgtctcagacagggaagcttcctcggtctccgtgtttcacctcatgggtgggtggattgcctaggatgagcgagcgctaggccggcgagactggccttgtcttctaggacaagtgcatttcccctgcgcttcctgtctcactcttgagggacatcctctcctccgctcacaggtggacagactccctggatcttttggctgtaacgaatgtcaggaaacaaagggactgagctgggactggggctggggctgcgtgcaggggaggttgcgtcagggctagctgggtggtggagggttgggggtggggtgactgttgcagaaacctctgtggtcctctggcaggcatttcaacatgtggcttggctgaggcacaagccccgtccaggttcccaggtcttctttgtgttcccttggcactcagggaaaggccacttgatcccctttctaccgggcgcatgcctgggcaccactgttgctttcgccctcgccccacatgcctccggtgacatacattcacgccatctgctctggtatacgccagtgccaggcgtgatcgcattgtctccacctgggattcgccccgtccctgtctgcacgtgtcctggaaagcggtgtcggcttgcaggagccccagggcttttagaagcgggccaggccaccgctctttcaaaggaggagggaggcagagggctcacggatcagtgaattttccgctgacagcaggccttgagggccatgggatcattctgtgctgcagcgaggccctgcctgcctcagcagatgtggtgagcccatcctttctcgcccagagtggtccaaaatcgcatctgaagaggagtcctgagaacccagcaggcgccctgaagctccccgtccatcggtggaagtcggctcaaggaggtcctgaagacgggactcctgggggctcggccctgggacacccgtggccccctctcccacgcggccccaaactggaccccggatccagcggcagccgcggctgcagcaggcgcgccccctgccgccgcgcagccgcccgtatttaaaggggacgcagcctgcctgactgccaggagccaagcgcgagtcggcccagccaaagcgcatgcgcgaggcgcgcgccgctttttgcttcacagtgcttcccacggttgtcttaggaaccagtccccgaggcttggcaacgcgggagccctccgtggcagcgcttgggtgtcgggcctccgaggctccggcctgacctctccacggggtccacaggaacgtctccggctgccaggagtcgcaaggggccgagcaggatgaggaaaccacaggcggagtccgggggaagcagcgtggcatcccagcctcagggctgtcaggacggtgttcgggtgagtctcccgagaagtcgtgcccccgtgatctcgaggacaggtccgcctgcgtgcccgagggctgttctctcagccgagggttgttcccctccagagcagaacccggcagccgcaggggttgcctgggggcgtgtatttctcggccaccgcggtaggactgtgtgtggggctgtgtctcccattctcccttctctctctgtctctcaccctctgtgtgcttctttccctctgtgtgtgtgtgtgtgtgtctttggacgaatgtgccctgtgcgtcaaaaagggatgtcttttatgtggaccggtctttggtgagcctctttctgcgtctctccctgggtcctgcggccagctgtccatcgtcttcgcggcggttccactttgggtctgtgcaggcctcgataacgtgaggggatgcatcgggcccggagcaatggaagtctcatccccatcctgagcggcctcttttctaggatcgagaggaccacactgcagcccaggacaaaagccccacggtagcacattgtccggcaggagaggagcagacccacgtccaagaagatggttttacctttccacgccccttctctgcgaaatgaagccacaccaccacacagtcttgaagaggaagcctggaatgggagacggcaacaagccccgtccctggaacgctggcctctctggacaagccacccgcttcgcacccctcctcttatgcccgtggcggtggcacggcgctgtatcctgcctgggctatggcctctgctctgtcgtccctcttgctctgtctcccctgtttctgagcggcctagatgcctctcggtctggctgaatatcttctacgaagatcacttccccgtccatcagggagacacttcctggagatccgtgtcatgactgtttctctctccaagcctgtttctgctggattgcgcaggtctgatgaccctggggctcttggcttccatacgtgtctcagacagggaagcttcctcggtctccgtgtttcacctcatgggtgggtggattgcctaggatgagcgagcgctaggccggcgagactggccttgtcttctaggacaagtgcatttcccctgcgcttcctgtctcactcttgagggacatcctctcctccgctcacaggtggacagactccctggatcttttggctgtaacgaatgtcaggaaacaaagggactgcgctgggactggggctggggctgcgtgcaggggaggttgcgtcagggctagctgggtggtggagggttgggggtggggtgactgttgcagaaacctctgtggtcctctggcaggcatttcaacatgtggcttggctgaggcacaagccccgtccaggttcccaggtcttctttgtgttcccttggcactcagggaaaggccacttgatcccctttctaccgggcgcatgcctgggcaccactgttgctttcgccctcgccccacatgcctccggtgacatacattcacgccatctgctctggtatacgccagtgccaggcgtgatcgcattgtctccacctgggattcgccccgtccctgtctgcacgtgtcctggaaagcggtgtcggcttgcaggagccccagggcttttagaagcgggccaggccaccgctctttcaaaggaggagggaggcagagggctcacggatcagtgaattttccgctgacagcaggccttgagggccatgggatcattctgtgctgcagcgaggccctgcctgcctcagcagatgtggtgagcccatcctttctcgcccagagtggtccaaaatcgcatctgaagaggagtcctgagaacccagcaggcgccctgaagctccccgtccatcggtggaagtcggctcaaggaggtcctgaagacggaactcctgggggctcggccctgggacacccgtggccccctctcccacgcggccccaaactggaccccggatccagccgcagccgcggctgcagcaggcgcgccccctgccgccgcgcagccgcccgtatttaaaggggacgcagcctgcctgactgccaggagccaagcgcgagtcggcccagccaaagcgcatgcgcgaggcgcgcgccgctttttgcttcacagtgcttcccacggttgtcttaggaaccagtccccgaggcttggcaacgcgggagccctccgtggcagcgcttgggtgtcgggcctccgaggctccggcctgacctctccacggggtccacaggaacgtctccggctgccaggagtcacaaggggccgagcaggatgaggaaaccacaggcggagtccgggggaagcagcgtggcatcccagcctcagggctgtcaggacggtgttcgggtgagtctcccgagaagtcgtgcccccgtgatctcgaggacaggtccgcctgcgtgcccgagggctgttctctcagccgagggttgttcccctccagagcagaacccggcagccgcaggggttgcctgggggcgtgtattgctcggccaccgcggtaggactgtgtgtggggctgtgtctcccattctcccttctctctctgtctctcaccctctgtgtgcttctttccctctgtgtgtgtgtgtgtgtgtgtgtgtgtttgtgtgtgtgtgtgtgtgtctttggacgaatgtgccctgtgcgtcaaaaagggatgtcttttatgtggaccggtctttggtgagcctctttctgcgtctctccctgggtcctgcggccagctgtccatcgtcttcgcggcggttccactttgggtctgtgcaggcctcgataacgtgaggggatgcatcgggcccggagcaatggaagtctcatccccatcctgagcggcctcttttctaggatcgagaggaccacactgcagcccaggacaaaagccccacggtagcacattgtccggcaggagaggagcagacccacgtccaagaagatggttttacctttccacgccccttctctgcgaaatgaagccacaccaccacacagtcttgaagaggaagcctggaatgggagacggcaacaagccccgtccctggaacgctggcctctctggacaagccacccgcttcgcacccctcctcttatgcccgtggcggtggcacggcgctgtatcctgcctgggctatggcctctgctctgtcgtccctcttgctctgtctcccctgtttctgagcggcctagatgcctctcggtctggctgaatatcttctacgaagatcacgtccccgtccatcagggagacacttcctggagatccgtgtcatgactgtttctctctccaagcctgtttctgctggattgcgcaggtctgatgaccctggggctcttggcttccatacgtgtctcagacagggaagcttcctcggtctccgtgtttcacctcatgggtgggtggattgcctaggatgagcgagcgctaggccggcgagactggccttgtcttctaggacaagtgcatttcccctgcgcttcctgtctcactcttgagggacatcctctcctccgctcacaggtggacagactccctggatcttttggctgtaacgaatgtcaggaaacaaagggactgcgctgggactggggctggggctgcgtgcaggggaggttgcctcagggctagctgggtggtggagggttgggggtggggtgactgttgcagaaacctctgtggtcctctggcaggcatttcaacatgtggcttggctgaggcacaagccccgtccaggttcccaggtcttctttgtgttcccttggcactcagggaaaggccacttgatcccctttctaccgggcgcatgcctgggcaccactgttgctttcgccctcgccccacatgcctccggtgacatacattcacgccatctgctctggtatacgccagtgccaggcgtgatcgcattgtctccacctgggattcgccccgtccctgtctgcacgtgtcctggaaagcggtgtcggcttgcaggagccccagggcttttagaagcgggccaggccaccgctctttcaaaggaggagggaggcagagggctcacggatcagtgaattttccgctgacagcaggccttgagggccatgggatcattctgtgctgcagcgaggccctgcctgcctcagcagatgtggtgagcccatcctttctcgcccagagtggtccaaaatcgcatctgaagaggagtcctgagaacccagcaggcgccctgaagctccccgtccatcggtggaagtcggctcaaggaggtcctgaagacgggactcctgggggctcggccctgggacacccgtggccccctctcccacgcggccccaaactggacccgggatccagccgcagccgcggctgcagcaggcgcgccccctgccgccgcgcagccgcccgtatttaaaggggacgcagcctgcctgactgccaggagccaagcgcgagtcggcccagccaaagcgcatgcgcgaggcgcgcgccgctttttgcttcacagtgcttcccacggttgtcttaggaaccagtccccgaggcttggcaacgcgggagccctccgtggcggcgcctgggtgtcgggcctccgaggctccggcctgacctctccacggggtccacaggaacgtctccggctgccaggagtcacaaggggccgagcaggatgaggaaaccacaggcggagtccgggggaagcagcgtggcatcccagcctcaggcctgccaggacggtgttcgggtgagtctcccgagaagtcgtgcccccgtgatctcgaggacaggtccgcctgcgtgcccgagggctgttctctcagccgagggttgttcccctccagagcagaacccggcagccgcaggggttgcctgggggcgtgcattgctcggccaccgcggtaggactgtgtgtggggctgtgtctcccattctcccttctctctctgtctctcaccctctgtgtgcttctttccctctgtgtgtgtgtgtgtgtgtgtgtgtctttggacgaatgtgccctgtgcgtcaaaaagggatgtcttttatgtggaccggtctttggtgagcctctttctgcgtctctccctgggtcctgcggccagctgtccatcgtcttcgcggcggttccactttgggtctgtgcaggcctcgataacgtgaggggatgcatcgggcccggagcagtggaagtctcatccccatcctgagcggcctcttttctaggatcgagaggaccacactgcagcccaggacaaaagccccacggtagcacattgtccggcaggagaggagcagacccacgtccaagaagatggttttacctttccacgccccttctctgcgaaatgaagccacaccaccacacagtcttgaagaggaagcctggaatgggagacggcaacaagccccgtccctggaacgctggcctctctggacaagccacccgcttcgcacccctcctcttatgcccgtggcggtggcacggcgctgtatcctgcctgggctatggcctctgctctgtcgtccctcttgctctgtctcccctgtttctgagcggcctagatgcctctcggtctggctgaatatcttctacgaagatcacttccccgtccatcagggagacacttcctggagatccgtgtcatgactgtttctctctcgtgtgtgtgtgtgtgtgtgtgtgtgtgtgtgtgtctttggacgaatgtgccctgtgcgtcaaaaagggatgtcttttatgtggaccggtctttggtgagcctctttctgcgtctctccctgggtcctgcggccagctgtccatcgtcttcgcggcggttccactttgggtctgtgcaggcctcgataacgtgaggggatgcatcgggcccggagcaatggaagtctcatccccatcctgagcggcctcttttctaggatcgagaggaccacactgcagcccaggacaaaagccccacggtagcacattgtccggcaggagaggagcagacccacgtccaagaagatggttttacctttccacgccccttctctgcgaaatgaagccacaccaccacacagtcttgaagaggaagcctggaatgggagacggcaacaagccccgtccctggaacgctggcctctctggacaagccacccgcttcgcacccctcctcttatgcccgtggcggtggcacggcgctgtatcctgcctgggctatggcctctgctctgtcgtccctcttgctctgtctcccctgtttctgagcggcctagatgcctctcggtctggctgaatatcttctacgaagatcacttccccgtccatcagggagacacttcctggagatccgtgtcatgactgtttctctctccaagcctgtttctgctggattgcgcaggtctgatgaccctggggctcttggcttccatacgtgtctcagacagggaagcttcctcggtctccgtgtttcacctcatgggtgggtggattgcctaggatgagcgagcgctaggccggcgagactggccttgtcttctaggacaagtgcatttcccctgcggcggttccactttgggtctgtgcaggcctcgataacgtgaggggatgcatcgggcccggagcagtggaagtctcatccccatcctgagcggcctcttttctaggatcgagaggaccacactgcagcccaggacaaaagccccacggtagcacattgtccggcaggagaggagcagacccacgtccaagaagatggttttacctttccacgccccttctctgcgaaatgaagccacaccaccacacagtcttgaagaggaagcctggaatgggagacggcaacaagccccgtccctggaacgctggcctctctggacaagccacccgcttcgcacccctcctcttatgcccgtggcggtggcacggcgctgtatcctgcctgggctatggcctctgctctgtcgtccctcttgctctgtctcccctgtttctgagcggcctagatgcctctcggtctggctgaatatcttctacgaagatcacttccccgtccatcagggagacacttcctggagatccgtgtcatgactgtttctctctccaagcctgtttctgctggattgcgcaggtctgatgaccctggggctcttggcttccatacgtgtctcagacagggaagcttcctcggtctccgtgtttcacctcatgggtgggtggattgcctaggatgagcgagcgctaggccggcgagactggccttgtcttctaggacaagtgcatttcccctgcgcttcctgtctcactcttgagggacatcctctcctccgctcacaggtggacagactccctggatcttttggctgtaacgaatgtcaggaaacaaagggactgcgctgggactggcgctggggctgcgtgcaggggaggttgcgtcagggctagctgggtggtggagggttgggggtggggtgactgttgcagaaacctctgtggtcctctggcaggcatttcaacatgtggcttggctgaggcacaagccccgtccaggttcccaggtcttctttgtgttcccttggcactcagggaaaggccacttgatcccctttctaccgggcgcatgcctgggcaccactgttgctttcgccctcgccccacatgcctccggtgacatacattcacgccatctgctctggtatacgccagtgccaggcgtgatcgcattgtctccacctgggattcgccccgtccctgtctgcacgtgtcctggaaagcggtgtcggcttgcaggagccccagggcttttagaagcgggccaggccaccgctctttcaaaggaggagggaggcagagggctcacggatcagtgaattttccgctgacaccagccttgagggccatgggatcattctgtgctgcagcgaggccctgcctgcctcagcagatgtggtgagcccatcctttctcgcccagagtggtccaaaatcgcatctgaagaggagtcctgagaacccagcaggcgccctgaagctccccgtccatcggtggaagtcggctcaaggaggtcctgaagacgggactcctgggggctcggccctgggacacccgtggccccctctcccacgcggccccaaactggaccccggatccagccgcagccgcggctgcagcaggcgcgccccctgccgccgcgcagccgcccgtatttaaaggggacgcagcctgcctgactgccaggagccaagcgcgagtcggcccagccaaagcgcatgcgcgaggcgcgcgccgctttttgcttcacagtgcttcccacggttgtcttaggaaccagtccccgaggcttggcaacacaggagccctccgtggcagcgcttgggtgtcgggcctccgaggctccggcctgacctctccacggggtccacaggaacgtctccggctgccaggagtcgcaaggggccgagcaggatgaggaaaccacaggcggagtccaggggaagcagcgtggcatcccagcctcaggcctgccaggacggtgttcgggtgagtctcccgagaagtcgtgcccccgtgatctcgaggacaggtccgcctgcgtgcccgagggctgttctctcagccgagggttgttcccctccagagcagaacccggcagccgcaggggttgcctgggggcgtgtatttctcggccaccgcggtaggactgtgtgtggggctgtgtctcccattctcccttctctctctgtctctcaccctctgtgtgcttctttccctctgtgtgtgtgtgtgtgtgtgtgtgtgtgtgtgtgtgtctttggacgaatgtgccctgtgcgtcaaaaagtgatgtcttttatgtggaccggtctttggtgagcctctttctgcgtctctccctgggtcctgcggccagctgtccatcgtcttcgcggcggttccactttgggtctgtgcaggcctcgataacgtgaggggatgcatcgggcccggagcaatggaagtctcatccccatcctgagcggcctcttttctaggatcgagaggaccacactgcagcccaggacaaaagcccaacggtagcacattgtccggcaggagaggagcagacccacgtccaagaagatggttttacctttccacgccccttctctgcgaaatgaagccacaccaccacacagtcttgaagaggaagcctggaatgggagacggcaacaagccccgtccctggaacgctggcctctctggacaagccacccgcttcgcacccctcctcttatgcccgtggcggtggcacggcgctgtatcctgcctgggctatggcctctgctctgtcgtccctcttgctctgtttcccctgtttctgagcggcctagatgcctctcggtctggctgaatatcttctacgaagatcacttccccgtccatcagggagacacttcctggagatccgtgtcatgactgtttctctctccaagcccgtttctgctggattgcgcaggtctgatgaccctggggctcttggcttccatacgtgtctcagacagggaagcttcctcggtctccgtgtttcacctcatgggtgggtggattgcctaggatgagcgagcgctaggccggcgagactggccttgtcttctaggacaagtgcatttcccctgcgcttcctgtctcactcttgagggacatcctctcctccgctcacaggtggacagactccctggatcttttggctgtaacgaatgtcaggaaacaaagggactgcgctgggactggcgctggggctgcgtgcaggggaggttgcctcagggctagctgggtggtggagggttgggggtggggtgactgttgcagaaacctctgtggtcctctggcaggcatttcaacatgtggcttggctgaggcacaagccccgtccaggttcccaggtcttctttgtgttcccttggcactcagggaaaggccacttgatcccctttctaccgggcgcatgcctgggcaccactgttgctttcgccctcgccccacatgcctccggtgacatacattcacgccatctgctctggtatacgccagtgccaggcgtgatcgcattgtctccacctgggattcgccccgtccctgtctgcacgtgtcctggaaagcggtgtcggcttgcaggagccccagggcttttagaagcgggccaggccaccgctctttcaaaggaggagggaggcagagggctcacggatcagtgaattttccgctgacagcaggccttgagggccatgggatcattctgtgctgcagcgaggccctgcctgcctcagcagatgtggtgagcccatcctttctcgcccagagtggtccaaaatcgcatctgaagaggagtcctgagaacccagcaggcgccctgaagctccccgtccatcggtggaagtcggctcaaggaggtcctgaagacgggactcctgggggctcggccctgggacacccgtggccccctctcccacgcggccccaaactggaccccggatccagccgcagccgcggctgcagcaggcgcgccccctgccgccgcgcagccgcccgtatttaaaggggacgcagcctgcctgactgccaggagccaagcgcgagtcggcccagccaaagcgcatgcgcgaggcgcgcgccgctttttgcttcacagtgcttcccacggttgtcttaggaaccagtccccgaggcttggcaacgcgggagccctccgtggcagcgcttgggtgtcgggcctccgaggctccggcctgacctctccacggggtccacaggaacgtctccggctgccaggagtcacaaggggccgagcaggatgaggaaaccacaggcggagtccgggggaagcagcgtggcatcccagcctcaggcctgccaggacggtgttcgggtgagtctcccgagaagtcgtgcccccgtgatctcgaggacaggtccgcctgcgtgcccgagggctgttctctcagccgagggttgttcctctccagagcagaacccggcagccgcaggggttgcctgggggcgtgcattgctcggccaccgcggtaggactgtgtgtggggctgtgtctcccattctcccttctctctctgtctctcaccctctgtgtgcttctttccctctgtgtgtgtgtgtgtgtgtgtgtgtgtgtgtgtgtgtgtgtgtgtgtgtgtctttggacgaatgtgccctgtgcgtcaaaaagggatgtcttttatgtggaccggtctttggtgagcctctttctgcgtctctccctgggtcctgcggccagctgtccatcgtcttcgcggcggttccactttgggtctgtgcaggcctcgataacgtgaggggatgcatcgggcccggagcagtggaagtctcatccccatcctgagcggcctcttttctaggatcgagaggaccacactgcagcccaggacaaaagccccacggtagcacattgtccggcaggagaggagcagacccacgtccaagaagatggttttacctttccacgccccttctctgcgaaatgaagccacaccaccacacagtcttccaaaggaggagggaggcagagggctcacggatcagtgaattttccgctgacagcaggccttgagggccatgggatcattctgtgcttcagcgaggccctgcctgcctcagcagatgtggtgagcccatcctttctcgcccagagtggtccaaaatcgcatctgaagaggagtcctgagaacccagcaggcgccctgaagctccccgtccatcggtggaagtcggctcaaggaggtcctgaagacgggactcctgggggctcggccctgggacacccgtggccccctctcccacgcggccccaaactggaccccggatccagccgcagccgcggctgcagcaggcgcgccccctgccgccgcgcagccgcccgtatttaaaggggacgcagcctgcctgactgccaggagccaagcgcgagtcggcccagccaaagcgcatgcgcgaggcgcgcgccgctttttgcttcacagtgcttcccacggttgtcttaggaaccagtccccgaggcttggcaacgcgggagccctccgtggcggcgcctgggtgtcgggcctccgaggctccggcctgacctctccacggggtccacaggaacgtctccggctgccaggagtcacaaggggccgagcaggatgaggaaaccacaggcggagtccgggggaagcagcgtggcatcccagcctcaggcctgccaggacggtgttcgggtgagtctcccgagaagtcgtgcccccgtgatctcgaggacaggtccgcctgcgtgcccgagggctgttctctcagccgagggttgttcccctccagagcagaacccggcagccgcaggggttgcctgggggcgtgcattgctcggccaccgcggtaggactgtgtgtggggctgtgtctcccattctcccttctctctctgtctctcaccctctgtgtgcttctttccctctgtgtgtgtgtgtgtgtgtgtgtgtctttggacgaatgtgccctgtgcgtcaaaaagggatgtcttttatgtggaccggtctttggtgagcctctttctgcgtctctccacggggtccacaggaacgtctccggctgccaggagtcacaaggggccgagcaggatgaggaaaccacaggcggagtccgggggaagcagcgtggcatcccagcctcaggcctgccaggacggtgttcgggtgagtctcccgagaagtcgtgcccccgtgatctcgaggacaggtccgcctgcgtgcccgagggctgttctctcagccgagggttgttcccctccagagcagaacccggcagccgcaggggttgcctgggggcgtgcattgctcggccaccgcggtaggactgtgtgtggggctgtgtctcccattctcccttctctctctgtctctcaccctctgtgtgcttctttccctctgtgtgtgtgtgtgtgtgtgtgtgtctttggacgaatgtgccctgtgcgtcaaaaagtgatgtcttttatgtggaccggtctttggtgagcctctttctgcgtctctccctgggtcctgcggccagctgtccatcgtcttcgcggcggttccactttgggtctgtgcaggcctcgataacgtgaggggatgcatcgggcccggagcaatggaagtctcatccccatcctgagcggcctcttttctaggatcgagaggaccacactgcagcccaggacaaaagccccacggtagcacattgtccggcaggagaggagcagacccacgtccaagaagatggttttacctttccacgccccttctctgcgaaatgaagccacaccaccacacagtcttgaagaggaagcctggaatgggagacggcaacaagccccgtccctggaacgctggcctctctggacaagccacccgcttcgcacccctcctcttatgcccgtggcggtggcacggcgctgtatcctgcctgggctatggcctctgctctgtcgtccctcttgctctgtctcccctgtttctgagcggcctagatgcctctcggtctggctgaatatcttctacgaagatcacttccccgtccatcagggagacacttcctggagatccgtgtcatgactgtttctctctccaagcctgtttctgctggattgcgcaggtctgatgaccctgggggctcttggcttccatacgtgtctcagacagggaagcttcctcggtctccgtgtttcacctcatgggtgggtggattgcctaggatgagcgagcgctaggccggcgagactggccttgtcttctaggacaagtgcatttccctgcgcttcctgtctcactcttgagggacatcctctcctccgctcacaggtggacagactccctggatcttttggctgtaacgaatgtcaggaaacaaagggactgcgctgggactggggctggggctgcgtgcaggggaggttgcgtcagggctagctgggtggtggagggttgggggtggggtgactgttgcagaaacctctgtggtcctctggcaggcatttcaacatgtggcttggctgaggcacaagccccgtccaggttcccaggtcttctttgtgttcccttggcactcagggaaaggccacttgatcccctttctaccgggcgcatgcctgggcaccactgttgctttcgccctcgccccacatgcctccggtgacatacattcacgccatctgctctggtatacgccagtgccaggcgtgatcgcattgtctccacctgggattcgccccgtccctgtctgcacgtgtcctggaaagcggtgtcagcttgcaggagccccagggcttttagaagcgggccaggccaccgctctttcaaaggaggagggaggcagagggctcacggatcagtgaattttccgctgacagcaggccttgagggccatgggatcattctgtgctgcagcgaggccctgcctgcctcagcagatgtggtgagcccatcctttctcgcccagagtggtccaaaatcgcatctgaagaggagtcctgagaacccagcaggcgccctgaagctccccgtccatcggtggaagtcggctcaaggaggtcctgaagacgggactcctgggggctcggccctgggacacccgtggccccctctcccacgcggccccaaactggaccccggatccagccgcagccgcggctgcagcaggcgcgccccctgccgccgcgcagccgcccgtatttaaaggggacgcagcctgcctgactgccaggagccaagcgcgagtcggcccagccaaagcgcatgcgcgaggcgcgcgccgctttttgcttcacagtgcttcccacggttgtcttaggaaccagtccccgaggcttggcaacgcgggagccctccgtggcggcgcttgggtgtcgggcctccgaggctccggcctgacctctccacggggtccacaggaacgtctccggctgccaggagtcacaaggggccgagcaggatgaggaaaccacaggcggagtccgggggaagcagcgtggcatcccagcctcaggcctgccaggacggtgttcgggtgagtctcccgagaagtcgtgcccccgtgatctcgaggacaggtccgcctgcgtgcccgagggctgttctctcagccgagggttgttcccctccagagcagaacccggcagccgcaggggttgcctgggggcgtgtgttctcgggcaccgcggtaggactgtcctcttgctctgtctcccctgtttctgagcggcctagatgcctctcggtctggctgaatatcttctacgaagatcacttccccgtccatcagggagacacttcctggagatccgtgtcatgactgtttctctctccaagcctgtttctgctggattgcgcaggtctgatgaccctggggctcttggcttccatacgtgtctcagacagggaagcttcctcggtctccgtgtttcacctcatgggtgggtggattgcctaggatgagcgagcgctaggccggcgagactggccttgtcttctaggacaagtgcatttcccctgcgcttcctgtctcactcttgagggacatcctctcctccgctcacaggtggacagactccctggatcttttggctgtaacgaatgtcaggaaacaaagggactgcgctgggactggggctggggctgcgtgcaggggaggttgcgtcagggctagctgggtggtggagggttgggggtggggtgactgttgcagaaacctctgtggtcctctggcaggcatttcaacatgtggcttggctgaggcacaagccccgtccaggttcccaggtcttctttgtgttcccttggcactcagggaaaggccacttgatcccctttctaccgggcgcatgcctgggcaccactgttgctttcgccctcgccccacatgcctccggtgacatacattcacgccatctgctctggtatacgccagtgccaggcgtgatcgcattgtctccacctgggattcgccccgtccctgtctgcacgtgtcctggaaagcggtgtcggcttgcaggagccccagggcttttagaagcgggccaggccaccgctctttcaaaggaggagggaggcagagggctcacggatcagtgaatttcgacgaattcttggcttccatacgtgtctcagacagggaagcttcctcggtctccgtgtttcacctcatgggtgggtggattgcctaggatgagcgagcgctaggccggcgagactggccttgtcttctaggacaagtgcatttcccctgcgcttcctgtctcactcttgagggacatcctctcctccgctcacaggtggacagactccctggatcttttggctgtaacgaatgtcaggaaacaaagggactgcgctgggactggggctggggctgcgtgcaggggaggttgcgtcagggctagctgggtggtggagggttgggggtggggtgactgttgcagaaacctctgtggtcctctggcaggcatttcaacatgtggcttggctgaggcacaagccccgtccaggttcccaggtcttctttgtgttcccttggcactcagggaaaggccacttgatcccctttctaccgggcgcatgcctgggcaccactgttgctttcgccctcgccccacatgcctccggtgacatacattcacgccatctgctctggtatacgccagtgccaggcgtgatcgcattgtctccacctgggattcgccccgtccctgtctgcacgtgtcctggaaagcggtgtcggcttgcaggagccccagggcttttagaagcgggccaggccaccgctctttcaaaggaggagggaggcagagggctcacggatcagtgaattttccgctgacagcaggccttgagggccatgggatcattctgtgctgcagcgaggccctgcctgcctcagcagatgtggtgagcccatcctttctcgcccagagtggtccaaaatcgcatctgaagaggagtcctgagaacccagcaggcgccctgaagctccccgtccatcggtggaagtcggctcaaggaggtcctgaagacgggactcctgggggctcggccctgggacacccgtggccccctctcccacgcggccccaaactggaccccggatccagccgcagccgcggctgcagcaggcgcgccccctgccgccgcgcagccgcccgtatttaaaggggacgcagcctgcctgactgccaggagccaagcgcgagtcggcccagccaaagcgcatgcgcgaggcgcgcgccgctttttgcttcacagtgcttcccacggttgtcttaggaaccagtccccgaggcttggcaacgcgggagccctccgtggcggcgcctgggtgtcgggcctccgaggctccggcctgacctctccacggggtccacaggaacgtctccggctgccaggagtcacaaggggccgagcaggatgaggaaaccacaggcggagtccgggggcgtgcatttctcggccaccgcggtaggactgtgtgtggggctgtgtctcccattctccctttctctctctgtctctcaccctctgtgtgcttctttccctctgtgtgtgtgtgtgtgtgtgtgtgtgtgtgtgtgtgtgtgtgtgtgtgtgtctttggacgaatgtgccctgtgcgtcaaaaagggatgtcttttatgtggaccggtctttggtgagcctctttctgcgtctctccctgggtcctgcggccagctgtccatcgtcttcgcggcggttccactttgggtctgtgcaggcctcgataacgtgaggggatgcatcgggcccggagcagtggaagtctcatccccatcctgagcggcctcttttctaggatcgagaggaccacactgcagcccaggacaaaagccccacggtagcacattgtccggcaggagaggagcagacccacgtccaagaagatggttttacctttccacgccccttctctgcgaaatgaagccacaccaccacacagtcttgaagaggaagcctggaatgggagacggcaacaagccccgtccctggaacgctggcctctctggacaagccacccgcttcgcacccctcctcttatgcccgtggcggtggcacggcgctgtatcctgcctgggctatggcctctgctctgtcgtccctcttgctctgtctcccctgtttctgagcggcctagatgcctctcggtctggctgaatatcttctacgaagatcacttccccgtccatcagggagacacttcctggagatccgtgtcatgactgtttctctctccaagcctgtttctgctggattgcgcaggtctgatgaccctggggctcttggcttccatacgtgtctcagacagggaagcttcctcggtctccgtgtttcacctcatgggtgggtggattgcctaggatgagcgagcgctaggccggcgagactggccttgtcttctaggacaagtgcatttcccctgcgcttcctgtctcactcttgagggacatcctctcctccgctcacaggtggacagactccctggatcttttggctgtaacgaatgtcaggaaacaaagggactgcgctgggactggggctggggctgcgtgcaggggaggttgcgtcagggctagctgggtggtggagggttgggggtggggtgactgttgcagaaacctctgtggtcctctggcaggcatttcaacatgtggcttggctgaggcacaagccccgtccaggttcccaggtcttctttgtgttcccttggcactcagggaaaggccacttgatcccctttctaccgggcgcatgcctgggcaccactgttgctttcgccctcgccccacatgcctccggtgacatacattcacgccatctgctctggtatacgccagtgccaggcgtgatcgcattgtctccacctgggattcgccccgtccctgtctgcacgtgtcctggaaagcggtgtcggcttgcaggagccccagggcttttagaagcgggccaggccaccgctctttcaaaggaggagggaggcagagggctcacggatcagtgaattttccgctgacagcaggccttgagggccatgggatcattctgtgctgcagcgaggccctgcctgcctcagcagatgtggtgagcccatcctttctcgcccagagtggtccaaaatcgcatctgaagaggagtcctgagaacccagcaggcgccctgaagctccccgtccatcggtggaagtcggctcaaggaggtcctgaagacgggactcctgggggctcggccctgggacacccgtggccccctctcccacgcggccccaaactggaccccggatccagccgcagccgcggctgcagcaggcgcgccccctgccgccgcgcagccgcccgtatttaaaggggacgcagcctgcctgactgccaggagccaagcgcgagtcggcccagccaaagcgcatgcgcgaggcgcgcgccgctttttgcttcacagtgcttcccacggttgtcttaggaaccagtccccgaggcttggcaacgcgggagccctccgtggcagcgcttgggtgtcgggcctccgaggctccggcctgacctctccacggggtccacaggaacgtctccggctgccaggagtcgcaaggggccgagcaggatgaggaaaccacaggcggagtccgggggaagcagcgtggcatcccagcctcaggcctgccaggacggtgttcgggtgagtctcccgagaagtcgtgcccccgtgatctcgaggacaggtccgcctgcgtgcccgagggctgttctctcagccgagggttgttcctctccagagcagaacccggcagccgcaggggttgcctgggggcgtgcattgcctaggatgagcgagcgctaggccggcgagactggcctttgtcttataggacaaagtgcatttcccctgcgctttcctgtctcactcttgagggacatcctctcctccgctcacaggtggacagactccctggatcttttggctgtaacgaatgtcaggaaacaaaagggactgcgctgggactggcgctggggctgcgtgcaggggaggttgcgtcagggctagctgggtggtggagggttgggggtggggtgactgttgcagaaacctctgtggtcctctggcaggcatttcaacatgtggcttggctgaggcacaagccccgtccaggttcccaggtcttctttgtgttcccttggcactcagggaaaggccacttgatcccctttctaccgggcgcatgcctgggcaccactgttgctttcgccctcgccccacatgcctccggtgacatacattcacgccatctgctctggtatacgccagtgccaggcgtgatcgcattgtctccacctgggattcgccccgtccctgtctgcacgtgtcctggaaagcggtgtcggcttgcaggagccccagggcttttagaagcgggccaggccaccgctctttcaaaggaggagggaggcagagggctcacggatcagtgaattttccgctgacagcaggccttgagggccatgggatcattctgtgctgcagcgaggccctgcctgcctcagcagatgtggtgagcccatcctttctcgcccagagtggtccaaaatcacatctgaagaggagtcctgagaacccagcaggcgccctgaagctccccgtccatcggtggaagtcggctcaaggaggtcctgaagacgggactcctgggggctcggccctgggacacccgtggccccctctcccacgcggccccaaactggaccccggatccagccgcagccgcggctgcagcaggcgcgccccctgccgccgcgcagccgcccgtatttaaaggggacgcagcctgcctgactgccaggagccaagcgcgagtcggcccagccaaagcgcatgcgcgaggcgtgcgccgctttttgcttcacagtgcttcccacggttgtcttaggaaccagtccccgaggcttggcaacgcgggagccctccgtggcagcgcttgggtgtcgggcctccgaggctccggcctgacctctccacggggtccacaggaacgtctccggctgccaggagtcgcaaggggccgagcaggatgaggaaaccacaggcggagtccgggggaagcagcgtggcatcccagcctcaggcctgccaggacggtgttcgggtgagtctcccgagaagtcgtgcccccgtgatctcgaggacaggtccgcctgcgtgcccgagggctgttctctcagccgagggttgttcccctccagagcagaacccggcagccgcaggggttgcctgggggcgtgtattgctcggccaccgcggtaggactgtgtgtggggctgtgtctcccattctcccttctctctctgtctctcaccctctgtgtgcttctttccctctgtgtgtgtgtgtgtgtgtgtttgtgtgtgtgtgtgtgtgtcttttgacgaatgtgccctgtgcgtcaaaaagggatgtcttttatgtcgaccggtctttggtgagcctctttctgcgtctctccctgggtcctgcggccagctgtccatcgtcttcgcggcggttccactttgggtctgtgcaggcctcgataacgtgaggggatgcatcgggccctccgtggcagcgcttgggtgtcgggcctccgaggctccggcctgacctctccacggggtccacaggaacgtctccggctgccaggagtcgcaaggggccgagcaggatgaggaaaccacaggcggagtccgggggaagcagcgtggcatcccagcctcaggcctgccaggacggtgttcgggtgagtctcccgagaagtcgtgcccccgtgatctcgaggacaggtccgcctgcgtgcccgagggctgttctctcagccgagggttgttcccctccagagcagaacccggcagccgcaggggttgcctgggggcgtgtattgctcggccaccgcggtaggactgtgtgtggggctgtgtctcccattctcccttctctctctgtctctcaccctctgtgtgcttctttccctctgtgtgtgtgtgtgtgtgtgtttgtgtgtgtgtgtgtgtgtcttttgacgaatgtgccctgtgcgtcaaaaagggatgtcttttatgtcgaccggtctttggtgagcctctttctgcgtctctccctgggtcctgcggccagctgtccatcgtcttcgcggcggttccactttgggtctgtgcaggcctcgataacgtgaggggatgcatcgggcccggagcaatggaagtctcatccccatcctgagcggcctcttttctaggatcgagaggaccacactgcagcccaggacaaaagccccacggtagcacattgtccggcaggagaggagcagacccacgtccaagaagatggttttacctttccacgccccttctctgcgaaatgaagccacaccaccacacagtcttgaagaggaagcctggaatgggagacggcaacaagccccgtccctggaacgctggcctctctggacaagccacccgcttcgcacccctcctcttatgcccgtggcggtggcacggcgctgtatcctgcctgggctatggcctctgctctgtcgtccctcttgctctgtctcccctgtttctgagcggcctagatgcctctcggtctggctgaatatcttctacgaagatcacttccccgtccatcagggagacacttcctggagatccgtgtcatgactgtttctctctccaagcctgtttctgctggattgcgcaggtctgatgaccctggggctcttggcttccatacgtgtctcagacagggaagcttcctcggtctccgtgtttcacctcatgggtgggtggattgcctaggatgagcgagcgctaggccggcgagactggccttgtcttctaggacaagtgcatttcccctgcgcttcctgtctcactcttgagggacatcctctcctccgctcacaggtggacagactccctggatcttttggctgtaacgaatgtcaggaaacaaagggactgcgctgggactggggctggggctgtgtctcccattctcccttctctctctgtctctcaccctctgtgtgcttctttccctctgtgtgtgtgtgtgtgtgtgtgtgtgtgtgtgtgtgtgtgtgtctttggacgaatgtgccctgtgcgtcaaaaagggatgtcttttatgtggaccggtctttggtgagcctctttctgcgtctctccctgggtcctgcggccagctgtccatcgtcttcgcggcggttgcactttgggtctgtgcaggcctcgataacgtgaggggatgcatcgggcccggagcaatggaagtctcatccccatcctgagcggcctcttttctaggatcgagaggaccacactccagcccaggacaaaagccccacggtagcacattgtccggcaggagaggagcagacccacgtccaagaagatggttttacctttccacgccccttctctgcgaaatgaagccacaccaccacacagtcttgaagaggaagcctggaatgggagacggcaacaagccccatccctggaacgctggccactctggacaagccacccgcttcgcacccctcctcttatgcccgtggcggtggcacggcgctgtatcctgcctgggctatggcctctgctctgtcgtccctcttgctctgtctcccctgtttctgagcggcctagatgcctctcggtctggctgaatatcttctacgaagatcacttcgccgtccatcagggagacacttcctggagatccgtgtcatgactgtttctctctccaagcctgtttctgctggattgcgcaggtctgatgaccctggggctcttggcttccatacgtgtctcagacagggaagcttcctcggtctccgtgtttcacctcatgggtgggtggattgcctaggatgagcgagcgctaggccggcgagactggccttgtcttctaggacaagtgcatttcccctgcgcttcctgtctcactcttgagggacatcctctcctccgctcacaggtggacagactccctggatcttttggctgtaacgaatgtcaggaaacagagggactgcgctgggactggggctggggctgcgtgcagtggaggttgtgtcagggctagctgggtggtggatggttgggggtggggtgactgttgcagaaacccctgttgtcctctggcaggcatttcaaaatgtggcttggactgaggcacaggccccgtccatgttcccaggtcttctttgagttcccttggcactcagggaaaggccagttgatccccctttccaccgggcacattcctggacagcaatgttggtttctcccttgccccatatgcctccggtgacatacattcacgccatctgctctggtatatgccagtgccaggcgtgaccgcattgtcaccacctggcattcgccccgtccctgtctgcacgtgtcctggaaagcggtatcggcttgcaggagccccagggctttcagaagcgggccagttcactgctgtttcaaaggaggagggaggcagagggctcacgattcagtgaattttccactgacagcaggccttgagggccatgggatcattctctgctgcagccaggccctgcctgcctcagcaaatgtggtgagcccctcctttctcacccggagtggtccaaaatggcatctgaagaggagtcctgagaacccagcaggcgccctgaagctccccgtccatcggcggaagttggctcaaggaggtcctgaatacgggattcctgggggctttgcccggggacacccgcggccccttgtcacaggcgccccgaaactgtaccccggatccagccgcagccgcggctgcgcaggcgcgccccctgccgccccgcacctgcggttatttaaagctgacacagcttgcctgagggccaggagcccatgcgagtcgacccagccaatgcgcatgctcgagtggctcgccgcttttcgcgtcatagtggttctcacggttgtcttaggaaccagtcccttggcaacgcgggacccctccgtggcagcgcttgggtgtcgggcctccgaggcttcggcctgacctctccacggggtccacaggaacgtctctggctgccaggagtcgcaaggggctgagcaggatgaggaaaccacaggcggagtccggtggaagcagcgtggcatcccagcctcaggcctgccaggacggtgttcgggtgagtctcccgagaagtcgtgcccccgtgatctcgaggacaggtccgcctgcgtgcccgagggctgttctgtcatcggagggtcgttcccgtcaggagcagaacccggcagccgcaggggttgcctgggggcatgtatttctcggccaccgcggtaggactgtgtgtgggggtgtgtctcccattctcccttctctctctgtctctcaccctctgtgtgcttcttttcctctgtgtgtgtgtgtgtgtgtgtgccagtgtgcgtgtgtgtctttgaacgaatgtgccttgtgcgtcagaaagggatttcttgcttgtctgccggtctttggtgggtttctttctgcgtctctccctgggtcctgtccagctgtccatcgttttcacggcggttccactttgggtttgcgaaatcctcgatcacgtgaggggatgcgtcggccgggagcaatggaagtctcatccccatcatgagcgtcctcttttctaggatcaagaggaccacactccagcccaggacaaatgccccacggtagcacattgtccggcaggagaggagcagacccacgtccaagaagatggttgtacctttccacgcctcttctctgcgaaatgaagccacagaacgacacaatcttgaagaggaagccgtgaatgggagactgcaacaatctgtgtccctggaatgctggcctctctggacaagccacgcacttcgcacccctcctgttatgcccgtggcggtggcacggcgctgtatcctacctgggctctggcctcctctctgtcctccctcttgctctgtctcccctgtttctgagcggcctaggtgcctcttggcctggctgaatatcttctacaaagatcacttcccagtccatcagggactctcttcctggaaatcggtgtcatgactgtttctctctccaaacctgtttctgctgggttggttaggtctggtgaccctggagctcttgtcttccatacgtgtctcagccagggaagcttcctcggtctccatgtttcacctcatttgtgggtggattttctagaattagttgtaggcgacagtgactggtcttgtcttctaggacaggagaggtgccgcatttcttctgcacttcctgtctcatcctttagggacatgctgtcctctgctcctgggtgtactgagtccctgaatcttttggccccctcctgcatcccaggtgttctttgattttccttcgcattgatggaaaggtcacttgtgccccgcttccgccggccacatgcctggacaccattttttgtttcgccatcgccccatacgccctcggtgacacacatttatgccatctgctctgcggtacaccatgccacgtatggtctcattggctccacctcggaatttcccctgtccctgtgttcacgtgtcctggaaagtggtatcagctttcaagtgcaccagggcttttcttttttcaaaggagaagggaggcatcagtgaattttcagctgacacctcgccttggggcccatgggatcattctgggatgcagcgaggccctgccttcctagcagatgtggtgagcccatcctttctcacccggaggggtccaaagtcggatctcaagaggagttctgggaccccagcaggcgcccagaagctccacctccaccccggaagtcggcttaaggaggtcctcaagaccggactcctgggggtttggccttgggacgcctgtggcctcctctcccacgctgccccgtactggacccctgatccagccaccgccagggctgcaatgcgagccgcccttcctctgcgtagccgctattgtttaaaggggtcgcagcctgactgccaggagcggagtgcgactcggcccctccaatgcgcatgcgcaaggccctggcgcatgctccagtcacagttattcccacggttgtcttagaaacccgtccctgaggcttggcaaagtaggagccctccgtggcagtgcttgggtgtcggggctccgaggctccggcctgacctctccacggggtcgacaggaacatctctggctgccaggagtcgcaaagggccgaccaggatgacgaaaccacaggcgaagtccgggggaagcggcatggcatgccagcctcaggcctgccaggacggtgttcgggtgagtctccccagaagtcgtgcccccgtgatctcaaggaccggtctgcttgcatgcctatgggctgctctctcacctgagggtcgttctcatgtggagcagaaccctgctgcctcagaggttgccttggggtgtggtgtgtttctgtgccagtgctgtatgactgtgtgtttttgtttctgtgtgtgtgtgtgtgtgtgtgtgtctcctattctctcctctctctctgtctcttactctttccctctctctgtcggtttgtttgtgtccttgtgcgtgtgtttgtttggacgaatgtgccttgtgcgccaaagaagctatttttgcatgtcgtctggtctttgttgagcctctttctgggtctctgcctgggtcatgtggccggctgtctatcgttttctcggcgtttccactttgggttcgtggagacctcgaccacgtgaggagatgcgtcagtcccggggcaattgaaatctcatccccatcctgagcagcctcttttctaggatcaatatgaccacactccagccaaggacaaaatgctcacaggaggtcatttttctgcaggggtggagccaaccaaagtcaaagaagattgttgtatcttttcacagctcttctctgagaacgaagccacacaacgatagaatcttgaagaagaagctaggaatgggagatggcaacaatccctgtcactggaacactggtctctctggacaagtcaccagtttggcacccctccccttatgcctgtaccgatggcatggtgctatatcctgcctgggctctggcctctgctctgtcctccctcttgctctgtctcccctgtttctgaggggccttgatgtttcttgatctgtctgaatgtcttcaacaaagaccacttcccagtcctccagggcgacacttcctggagatccgtgtcatgattgtttctccctccaaacctgtttctgcttgattagccagggttgatgatcctggggctcttggcttccatacgtatctcagacagggaagctagcttggtctccatgtttcacctcatgggtgagtggattgcctagaatgagcagtaggtgactgtgactggccttgtcttctagggcagggacatgtcgcatttcctctgcacttcctgtctcattcttgagaaacatcctcccctctgctcatgggtggactgactccttgaatcttttggctgtaatgaaagtcagggatccaatgggactgggctggggctggagctggatgcaggggaggttctgtcagggctacctgggcattggaggattgggggtggattgaactttgcataaacctctttactcctccagcaggcttttcaaaatgtggcttggactcatgcaataagaaatttaccggttgaaagggcccctttttcaatggcactctgggtaacatcgcttcagcacaatcatatggtagagaagccttatcaaatttgctgtccctcagggctcttaaagatgcttgataaattattagggaaataagaaacaaattgaaaggaaaaggaaatccaaggacctgccccagaagaatcatagatatgtttgaatacttattcattatttgccccagatagaaaatgtttgttaatcaaaaggcaaaagttataatgaggaagataatattgcctggggcaatgttgagacaaataaggtgaagatcaaccaaacgccctgagtcctttggcccaaatccctgctggggacccaaatacttttgatatagcatcttgctacctgaggaacgcaaggagaataatactcataagcagagcctctgttttcccataggactgactctaactatgtgaagaactgctacatattctacagtgcttaataggcggtgcctatctaacaggagctgtttggcttgtggatagcagttccaagatgaacaaatgacattgtgtttgaaagccactgctcttattaaagaagagtcaagcaaatgtttttattttgagttatttatagtttagaaaaattgggtgaagtgtgtttttgtgagcaaatttatttttctctaggttatccgtaatttgaaagctgtgagtattctgattaggtgacaatatagttatttgcttaagtacatcttttattgtaaaatgggacaaatggagacactggttattttacccaggctttgactagaataacttaattttaggtaaatcccaacaaacccaacttaagaggagtctatatgaccaattaattgtttctgcactttaagcaaatactcaggctgtactagtcccttctcacactgctataaagatattacctgagactgggtaatttataaacaagagaggtttaactgacagttctgcatagccggggaggcctcagaaaacttacagttatgatagaaaggaaagtaggcaccttcttcaaaaggtggcaggagagactgtgtgtgtgtgtgtgtaaaggataaaatgtcaaacacttatacaatcatcagatttcataactcactatcatgaaaacagcatgggtgaaacaactcccatgatacaatcacctcccaccaggagggatgacaatttgaaatgagatttgggtgagcacacagagtcaagccatatcacaagccaaccataataagcctaaaacttatttttcacacaaattgttctcactatgacttctcctacagattgtttcaagggaaaagggtaatgcttgttactaaatgtcagctctggcttttattttattgagtacaaattgaatcataaaatttttttattttattttattttcctttaagttccagaatacatgtgcagaatgtgcaggtttgttaagtaggtatacacgtgccatggtagtttgctatacctattgacccatcctttaagttccctcccctcacccctcaccccccaacaggccctggtgtgtgcttttctgctccctgtgtccatgtgttctcattgttcaacttccacttatgagtgagaacatgtggtgtttggttttctgttcctgttttagtttgctaaggatgatggcttccagcttcatcaatgtccatgcaaagggcatgatctcattccttttatggctgcatagtattccatgatgtatatgtactacattttgtttatccagtctatccttgatgggcatttggactagttccatgactttgctattgtaaatagtgctgcaataaacatatgtgtgcatgtgtctttagagtagaataatttatattattttgggtatatatccagtaatggggctgctgggtcaaatggtatttctggttttagatccttgaggaatcgtcatactgtcttccacaatggttgaactaatttacatgcccaccaacagtgtaaaagcattcctatttctccacagcctggtcagcttctactgtttcttgattttttaataactgccatccgactggtgttagatggtatctcattgtagttttgatttgcatttctcaaataatcagtgatgttgagctttttttatatatttgttggccatgtaaatatcttctttggagaagtgtctgttcatgttctttgctcattttttgattgggttatttgtttttttcttgtgaatttgtttaatttccttgtcaattctggctattagacctttgtcagatgggtagattgcaaaatttttctcccattctgttgtttgcctattcactctgatgatagtttcttttgctgtgcagaagctctttagtttacttagatctcatttgtcaatcttggcttctgttgcagttgcttttggcatttttgtcatgaagtctttgctcatgcctatgtcctgaatggtattgcccaggttttcttctagtgtttttatggtttggggcttgacatttaagtcttatgtttaaggtttaaagtcttaagtttaaggtttaaggaagggttccagtttcagttttctgcatatggccagtgaattttcccagccctatttattgaataggagattctttcttcattgcttctttttgtcaggtttgttgaagatcatatggatgtagatgtgtggtgttatttctgaggtctttgttctgtttcattagtgtatatgtctgttttggtacaagtaccatgctgtgttggttagtgtagccttgtagtatagtttgaagtagtgtgatgcctccaactttgttctttttgctattccaaacaattgaaaaggagtgacttccccctaactcattttatgaagccagcatcatcatgatagcagaatcaggaagacacacacacacacacacacacacacacacacacacttcaggccaatatccctgatgaacatcgatgcacaaatcctcaataaaatactagcaaaccgaattcagcggcatatcaaaacacttatctaccacaatcaagtcagcttcatccctgggatgcaagactgttccaccatgcacaaataaataaacataatccatcaacataaacagaaccaaagacaaaaaccacgtgattatctcaataggtgcagaaaaggcctttgataaaattccacaccacttcatgttaaaaactctcaataaactaggtattgatggaacatatctcaaaataataagagctatttatgacaaccctacagccaatatcacagtcaatgggcaaaagctgtaagcattgcctttgaaaactggtacaagacaaggaagccctctctcaccacttctattcaacatagtattggaagttctggcaagggcaatcaggcaagaggaagaaataaagggtattcatataggaagagaggaagtcaagttgcctctgattgcagatgatatgctgctatatttagaaaactccataatctcagccccaaaaccccttaaactgataagcaacttcagcaaagtctcatgatataaaatcaatgtccaaaaatcacaagcattcctttacaccaacaatagacaagtagagagacaaataatgaatgaactcccattcacaattgctaaaaaaatgaataaaatacctagaaatacagctaacaagggatgtgaaagacctcttcaaggagaactacaaaccactgctcaaggaaataagaggacatacacaaatggaaaaagattccatccccatggataggaaaaatcaatactataaaaatagccatattgcccaaagtaatttatagattcagtgctattcccatcaaactaccactgacattcttcacaaaattagaaaaatctactttaaatttcatacagaaccaaagaagaccccgtatagccaagatgatcctgagaatcctgaaagttttcatagttataataatcttctaatgagtacaggattatcatttttcttcatattttcagttggtgacctaatgaaatagcgtattttttctcttttgacacacaagtactcttctgatggtcaaaatagtaagttatttatctctccttgtttcacttcaaaggaaaccagaatcatggcattctgaaagttagagatgcaaatctccattatttggcatcccactggacccgatctgtttttcattgcaaatgtcctgctgctaagactatgcaaggaccctccctctaggcccagagactgttgcagaggagatgggtgcatgagattgtaagggctggttatgagggatacagttagctcagacactccaaatcaaggagggtacacaggtgcctaaacagcttgtaaaacaaagaactttgctttctcagctattatgtggcacctttttatccaccccaaccatgaaaaatgtcctgcttcctggaattaaaacaaaataattattaagaggataaagatacctcatgaccaagcctcctgggcataatactcccagttataagttttgcagatatatatatatttagatatataaaattattttttagaaaaatgtatatgttttgtatagttaatcactgtaagtctgtaatgaaaaccaagattatagtagctcaatgcatagaagtgaaagaaaagtcaatttttgtaaactcgccattggctttttgtttttggctctttactttaaatatatcttttaaggggtaatgaatgcctgtccgagtccattcctgtctttcctagaacgcttacttgtctataagtatttgacttcaagtccctccaccatagagagtctcactgaagggcaggatggacacagggcaggcagatatgccacccaagcagtgctaggggaaaaaaaataatagccattgatgctgatgctggcaaatattggccataaatggaagaatgtaagccaaaaataaaattctaagcccttcaaccatctgaatgtacccctcctctcggccataggaattccagattgaaactgaaaatcttgttcaggccatgatggaagagagcattggacatgcctcattatatttctctagcattaacatcaacacagaccttaagacatcaacatcagacctaagagtctgatcagaaatatttaacatctattttctctgaagcctgctacctggaggctttatctgcctgataatatctaggtttctccaactccttatcttaacccagacattcctttctactgataataactctttcaaccaattgccaatcagaaaattttaaaatctacctataacctggaagtccccacttcgagttgtcctgcacttccagactgaaacaatatataccttacatgtattgactgatgtctcatgtctccctaaaatgtgtaaaactaggctgtgccctgaccatcttgtgcacatgttctcagggtctcctgagggctgtgtcatggcccattggtcacttatatttggctcagaataaatctcttcaaatattttagagtttgactctttttgttgaccagtcactccctagtaagtttaggagcagggatctgacagcaaccatatcatgctcagaaacagcattctctcatccactgtccccaggctctgcagaacccagggtcctggtatccataacccaaggaaatgggaaggagtcatgagctcttgggctttctcattctctgaaaatggacaattgataactagccgtgattttgtttagaagtataaataaatgtcacatttctaagcaaaatcaagtctagtttcaaatgtgtgaaaggaaaatagaaacttgggaccccaattcactctgccaaaaggagaaagttaagctgaaagctgagtcatgtgagaagctgactttccttttgctcttaagcacacagctccagatagaaggtaaaatattcccacaggtaggtgctctgtcctcatcttaccttatgtgaagtgctgatttactgagcataagatgaataccaaattgactattcccctgccttatccttttcttttgcaatgtgtggattcagtaatgtgaccatacccttcctctttcccctccagcaaactcttcccctttaagtattgaagcctcagcatcatttttggaaaaaggcacagaccacagattgtttctattattctgtgttttttccttccaacttgtccttaatcttggcaaaataaacttctaaattgattgatacctgtctcagatacttactcgtttatgaatattagaagcagtttgtgttctcgtcgtatgtgttattacagctatccctttttatccaaccttttactatcaagctcaataatctaataaaatcagataactttttaggtgagtccctttctatataaactcttgctattcatactggagctacattcatttggatagtgctctccctcctgagtcaagcttggtgcctgactctccctatccaaatcagaagccaaatagacttggaaggttcaggcagtcagtgtacacagaacacacacgaccttttcgtttagccatcgctagttatctctagtaggtgtaataaggagaaatgtttacttttcaaatacattgctgtggtgttttaatttttacaagcatgtttacataactaatttttataaaatacacctgttgctggatacctcttgttcctatcttgataaccatcaccgagatttgcaaaggaggccttgctcaaatatttggaaactaatgccctcagggagatgtccaccagccttgttcctctcattcctatttaaagattgtaatgtcattgggtctttccctagggtggcccctggttttccaggctggacactcctgtgttgaagatgcatcgactcacgtactgcattaatgttttagattttactgtgaagcaaacaattcactcctcagaccctcagtcacccaagtccacatctggacttgaggtttggcttctctggtcctaactgggacttatctgaccctgacaggagataacttcagtagggactttccctaatagcaaacatgcacacttcaacttggcttgccctgaaggtaacatttactcattataatggtaaaaaaaaaacacacccctgggtggagatttcagacattactaagacgtgtgatatatgtactagcgtgtatgaccatacagcatgtgcacccaggagaccacccaaaacatgtttgctagtaacaccccttcacaacccctttcatgaataatcatataagaccctcataagggagcttccccagtgccgatcaacgctgtttctttttccaagcagcccgctctgacttggcttttagagggtactctctctttaaataaactctgcagctgcttcactgtcactgattacttcttggctgaattctttccttcaagaagacaagaactgaagaccccacaccttccggtaacattaccaactctttctcctttttctctggagctggtgctcagatggtgagagccctgagctaatagtcccagggtgggagcctgtttgcccctgtctggtcctcagcaatgtccttggtcagcttcctggcaagagctgtcgattaccagagggaacaagtgatcagcaccagagtcgatcacttcacagaggagctgaagtggacagggtcagctcaggcctcacggactagggcgggaatgtcccgtgacggcaggtcagtgtcttagcttcctttgaggcacctcttcatagactgcagggatcatttaggtaagaatatagcctgctgacttttacaccttgctgaaaatctttgctaatagcaatctgttagctgtgaaaattaccattgttttttatttttcgttttgttccttattactgaagatattctatggagcgttaaagcctcctgcggtaagaaactagtaaagaaacatactgtttgcaggaaggaaaattacccacaattcttgttctctaaggtgcgtggttatcattccaacagccattctcagcaatgaactgaagaccctcagatgtgtttcattcccttagtattttaatcctctcctccactctcaattgccacttctcccgtgaatgaggggagaggggttgggagggacatctcctgtcttgggcccacagattttaaagttcaagtcagaagctccagtgatttcctgtatgtagtagtcaggggcaagacagatctgtggttggtagtctttccttctctgtacatctgccagcctctctcctcaagctggggcttcatggagtcccagaactttgaacctgaagtagtgtcagcagccatgttgcagctggagtcaggccaattgttggtcttgctccctcgtgactgggacacttggaagagccaaatgggcaggcttggagagcgtgtacttttggaactgaagtgtatcttaaaccatttcattgcaactacgtgtgtgtgttgggaggatgcataacagcctcactgaggggtgactgacatataatagaaggacttgtgcacccgtgaaaccatcactgttatcaagacagcgagcatgtccatcccccataggttttcttgtgctcctttgtgatcccttcctcctgcctctcctgccatgctccaccccaagcaaccactgatctgctttctgtcacaatatatagattggaaaactacttataataccagttctaacctcatcaagcaaatactttctttttgtcagttgaacttttcattgtgtgttcaacattcttgattcagaaagagtgagagagaaaggctggtgtgggcccttcctgggaggcctggccctatccacagctccagtgtggctcacgtgccctggagcccctgcccacaggacagtcctgactgctcatccacaagctttgtggtatcctctaccattcctaggcaggctctgtacagtgcagaactttctcccagtccttgcaccaaaataacaaatgtcagagatagtacatttggagccagtggctgtgcctcacctctagatgcctgtaatactgagctgctaagcaagaggtccctcccttcttgcccttttcttggggcctcatcccttgtgctctgctcttcctcacacaggatatatcttctgattgctcctctcccacctcctgcagtccctggacccccatggcaatacaaacagactcttctatatcctcagtccattgcaggaccacagctctgacctggctgtcctctgttttccaagccctgcacctgtggagttgggaattagcacccacttgaccccattgtggcatcaggcccaccctccccaatgcaggaagagttccagatgttggggagctatggcattatcctgcacacatatcatgtcctggcctgggaaagtgatgatgatgatattttcccacaaaatagacaataacatcatgaaagtgccttgttcattttctagcataaaatatatatcaaagcagtggggtttagtaggcatacgtagatttaaaagctcctcagaaggcagggaatgatttcttcaacagaaaaaaaaactaccccaaaaggagaatctcaatactttggttgatagtaaattaagaatccctcaagaaattcagtaggagagggaaaagataagtcaccaatgggaaatatatttgtcacaatataacaggcaaaggactcatgtccagagtgcatgaaggatttctacaaataaaataaagaatccaacagaaaaatgaagaagagaaaggaataggaacttcatttttaaaaaagagaaaagaaaaaggaagtaaggaaaaacaaatgaacatccaaatggccagaaagcatataaaaatgcccaacctcataaaccatcagacaaatgtgatccacaatgagaagccaatacacaccgaccagcacggctaaaattaagaagactgttaataccaagtgttggtgagaatgtgaagtaactgaaacatttatacactgctggtggaaatgtgaaatagcacaactactttggaaaattatttgggaatactgctaaaggtgagcacccctatgatcctgaaatcccactccaatatgaaaacccaaaagaaatgcatcctgatagaggcactcttcatagtagcccaatgttaatcatggaagaatggacaagtatatatcatatcatggaatttttatggtaatgaaaatagattaataactgccatgcacagttggtgaatcccaccaacataatgttgagtgaaagaaacctgatacaaatgaatgtatactacactatttcatttctgtgaagctccaaaataagcaaaacgaacctatagtgttataagtcagtagagtgattatcttagtatttgcatgggagctctggtaatgttttatttcttgatctaagggctggtgtcccagatgtgttcactttgtgataattcatcaatctgttttcttgggagctgtggcttatctgtgcagatatactccaattaaaaaaatcattcaactcaatgacaacaacaacaaaaaaaactcgattttttaacattttgtggagtgtttattatgatccagtcagcgtactaaatacactattttatttgatccttaaaataacttaaacaacttgatttaaatatgggcaaaggacttgagaagacatttctccaaagaagatatacaaaaagcacatggaaaacccttgacataattagtaatctgggaatgcaaatgtaaaccacggtgggataccacttcacacatgttagaatgactattatccaaaaataaaacaaacagaaaataacaagcattggcaaggatgtggagaaattgaaacccccatgcattgttggtgggaatgtaaaatggtgcagccgctgtggaaaacagtttgatggctcctcagaaaaccatacacagaattaacatatgatccagcattgccactttcaggtatatacccaaaacaatagcatgaaacacataaagagacatgttcatagcagtattattcagaataactaaaaggtggaagccatgttaagtgttcattgacagatgaatggataagcaaaatgtggtatatccatacaatgaaatattattcagcttttaaaaggaaggaaatttgatacatgcaacaacatggatgaatcttcaggacattgcgttcagtgaaataaaccagtcacaaaaagacaaatactacaagattgcaattacatggatacctagaacagtcaaattcatacagacagaaagtagaatggtggttgccatgtcccaaagccaacataaagcagcagttgtggacagcttcagtttcagctgaacttgactgtatgttgtgctgaaaccagggtaatctgatgtccaacactcagagccagttaagacttttgtttctggtgacctggggagctgacagtgcttttcaggcacacctggggtaactcttatttcccaaatgggttggcagattgttgtgggtgccaggtctttgatggactggatctagacacgaataaatagcctgctgggattttgattcggattgtagtcaatctatattgaatctgtgttttaagagtataacctcttaacaatattgagtcttctcactcatgaacaacatatatctccccatttatttatggcttctttaatttatcatagcaatgttttacagttttctgtgtacaggccttttacattttttgtcagatttgttcctaagtactttacattttgcatgctattgtaaatgttgttaatttttttattttaatttcttcattttttacttgacaaatacaaattttatctattcatagtgtacaatatgatattttgcaatatgtatacattttgggatggttaatccaaccaataatatatgcattacattttaattttcaattaagttacaaagctctcattaaacaatttttgtacactaatttgtcctgaaaccttgataaacacacttattaacttcttgtacattccactgaattttctacacagacagtcatgtcgtctgtgaataatgaccatttatgtctttctttccaaactgaatgtcctttatttctgtttcttggctgattgcacagtctacagcctccaatacagtgctggatagaggtggtgagggcaggcatccctagtgtgttcctgatgtgaaggggaaagtattcagtcttccacaatcaagtgtgatgctagctgaaggacttttggaattgccctttatcagcttgaggaagttccctctgttcctaatttgcctcagtttttatcaataatggatgttggattttgcaaaatgttttttctgtattgattatggtgatcatataattttttagtttgtttatgtggtaaattacattgatttatttttttactcttaaatcaaccttgcatttctaggataaataccacttaattatgatgtattacatttctattatatttaggattccatttgctaaacttttgcatagaattcttgccctatgttcatgaggattattggtctgtagttttgttttcttctaatatccttgtctggccagggtatcagggtaatgctgatttcatagattgagttgggaagtatttcctcctcttcagtttttggaagagtttgtgaagtcttgttattacttctcccttaaatgtttggtaaaattcactactatcaccatctgggcctgaatttctttatagggaggtttttatgttattctttttttttttttttgagacagtctccctctgtcacccaggctggagtgcagtggtgtgatctcagctcactgcagcctccacctcctgggttcaagtgattctcttgcctcagcctcccaagtagctggtattccaggctcatgccaccacgcctggctactttttgtatatttggtagacaagaggtttcactgtgttagccaggatggtctccatctcctgacctcatcctgacctcatgatccgcccacctcagcctcccaaattgctgggattacagggatgagccacggagccaggatttttttttttttttgagggagagtctcgctctgttgcccaggctggagtgcagaggtgtgacctcagctcactgcaacctcgggggaacccacccctgataattcaatgtgggtacttttctattttccctaagtgtcagccagtctgagaaataaagggaaagagtacaaaagagagaaattttaaagctgggtttccaagggagacatcacatgtcggcaggttccatgaggccccacaagccgcaaaagcagccagtttttattagtggttttcaaatggggagggagtgtatgaacagggtgtgggtcacagagatcacatgcttcacaaggtaataaaatatcacaaggcaaatggaggcagagtgagatcacaggactggggtgaaattaaaattgttaatgaagtttcgggcacgcattgtcattgataacatcttatcaggagacagggtttgagagcagataaccaggtctgaccaaaatttattaggcgggaatttcctcatcctaataagcctgggagtgctacaggagaccggggcttatttcatcccttatcgacgatcataaaaggcagatgttcacagagcggccatctcagagacctccccctaggaacacactctctttctcagggctgttcttcgctgagaaaaagaattcagtgatatttctcctctttgcttttgaaagaagagaaacatggctctgttccgcctggctctcaggcagccagacctaatggatatctcccttgttccctgaacatcgctgttatcctgttcttttttcaaggtgcccagatttcatattgtttaaacaatttgtgcagttaatgcaatcatcacagggtcatgaggcgacatacatcctcagtttatgaagatgacaggattaggagattaaagtaaagacgggcataggaaatcacaagagtattgattggggaagtgataaatgtccatgaaatcacaatttatgttcagagattgcagtaaagacagacataagaaattataaaagtattaatttggggaactaatacatgtccatgaaatcttcacaatttatgttcttctgccatggcttcagccagtccctccattcagggtccctgacttcctgcaacaccccccatcccaggttcaagcaattttcctgcctcaacctcccaagtctttggggttacaggtgcctgccaccatacctagctaatttttgtatttttagtagagatgaggtttcactatgttggccaagctggtctcgaactcctgacctcaggtgatctgtctgcatcaacctcccaaggtgctggtgctgggattaaaggcataagccactgtgcctagcctatagggaggttttaaaacaacacttttcatcatttctaggccttttacctaagatcaagtgtaaaaaatgaatttgagtttctttaatagatacaggggttttcaagttatccatttcttcttgggtgaactttggtaatttgtctttgaactaatttgtcaattttatccatggtgttgaatttaattggcataaaagtattcctagtattattttactatccctttatatctgtagaatctttagtgatgtcacctctctcataccttctactggtaattctctcttttttccctgatcaatctggctgaaaatgtatcaatgtcattgattttcccaaagaacaagacttgggattcattgattttcctctaacctattttctttcactgattcccactttgatctttattattccatttttctgcttactttggatttaatttgcttttttttcccatctttaagtgaaaactgaagtcactgatttgagtcctctcttcttttctaatataatatttaatgacataaattttcctctaggtactgttttagtgacagcccatatattctatgttgttttctattttcattcactttgaattgctttctaatttccctttagatttctcctttgacctatgggttatttagaagtgtattagatgtcagatatttggggattttcaaggatctttctgtcactgatttctaatttaattctaattcgtcatatgcagtatgttccacagagaacacactgtgtatgatgaatgcttttgaatttattgagacttttaaaaatcagccacaatgtggtctagattcataaatgttccatgtgcacttgggaaaaatctgtattctgctattgtagagcgaagtgttctgcaaatatcaatcaagtcaagttagctgatagtgttgttcaaatctactatattcttttttgtttgtttgtttgtttgtttgtttttgagatggagtctcattctgtagcccagtttagagtgcagcagcacaatctcggctcactgcaacctctgcctcctgggttcaagtaattctccctgcctcagcctcccaagtagctgggattacaagcgcttgccacatgtccagctaatttttgtatttttagtagagatggggttttgccatgttggccagactggtctcgaactcctgacctcaggtaatctgcccacttcggcctcccaaagtactgggattacaggcatgagccactgcacccagcaaaatctactgcattcttactgattttctgcccacttgttctattaattattgagagagagctattaaaatatctgatagttatgcatttttctatttctctttgatgttttattagtttttcttttattcattttgaaggcttattaggtacaaaaacatgaaggattgttatatcttcttcgctgaccacatcgtcagtatgaaataacctttaattcctagaaataattctttgctctgaaatctattttgatattaatatagccactctaaatttcttttgactagttttagcatggtatatctttttccatctttatacttttaacctatttgtgtctttatatttatagtgcctttcttataggcagaatatagttgggtctttgtttttcaatgtaatttgacactctctgccttttagttggggtatttagactatttacctttaatatgattactgatatgattaggttgagccactcaccttgcatatgttctctattcatctcatctgttttttatttcctttttccattttcctttgaattaatcaagtatttttatcataccattttatctcattttatctctcttgttaaacagccacatttctttttttttttttgagatggattctcactctgtcacctaggccagagtgcagtggcatgatctcggctcactgcaagctctgcttcctgggttcacaccattctcctgccttagcctcccaagtagctgagactacaggtgcccgccaccacacctggctaattttttgtatttttagtagagacggagtttcaccgtattagccaggatggtctcgatctcctgacctcatgatccatcctcctcggcctcccaaagtgctgggattacaggcgtgagccactgcacccagcctacaattcttttttgttttaattgtaaaccttaagataatacattttatttgaagtaaggtgctgaagaggtgttatttgtgtagggtgttaaaataatggtaagctatgagaaggggaaaagggcactgaggctaaggagttagtttaaaaaaaaacagaccagtacacatgggaatgtttgtgtagttttgtactggggtggttagatttggcagtcgctgaagctatgtatgtaggcaaagactgaatgagagatgaatctggaatggcaatttcaaattagtcactagaagacctcaaaccatcccctctacaaccccagttctgtagatattgaaagaatggtggacccggggcccactctctctgaacttgactcctcacttccctatgaaagctggctttgctatgtgccctgtgatatacatctgtttgtccccactttccaaaagtatgaatcttgtctctggtttacctccaatgcctagaaaaatatgtggcagaacgcatgcttcagtaaataatcttttaatcactgaatatttcaagaattccacataattctataagacattattaactattgtaaatttttaagtggagaaaaagtactatgttgcctttatttcatgaaagcaaccttaagagttggcatgaacacatctatccatctacttgtgtttgtgctcatatactcatatcccacttactatggatgaatggaatgatctatcatctaaagtcaatatttctttttcctaacttccaatccaaggacattattccagaaatacttccttgtatgtcctacattatcaattttgccctctctgtggatgatttccattggcatgcaaacatgctgttattttttctcttcttatagaacattaaacacaacgatcttgactctacttcctctataattacttgccttttctccattcctttttttgagtgaagcttcttgaaattgttgcctgtgcttactgcattcaacccctctactttgttctctcagaaatcccttttggtcaagctttctccttatcacttcacccaaaggactcttgtgaggtcatcagggctagccactttactaaatccaatggctgtttatcaggtcccattttatgtcaactttcagcagcatttgataaagttggccaccattttcttgaaataatgttttcctttggctttgtgaacatcatactctcctttactggttgcttttcagtttctttttctggttcctctttacccttctttatttttatttcaataggtttttgtggggaacaggcagtgttttgtatataagttttttagtggcaatatctgagatttttatgcatccatcaccagagcagtgtacactgtacccaatgtgtagtcttttatccctcgaccccctcccaccctttcccccaagtccccaaagtccattgtatcattcttatgcctttgcatcctcatagcttagctcccacttacaagtaacaatatacaatgtttggttttccatttccaagttacttcatttggaataatggtctccaattccatccaggttgctgtaaatgccattatttcgttcctttttagggttaagtagtattccatggcatgtatgttgtgtatatatatatacatatatacatgtatatatatatacatgtatatatgtatatatatatacacgcacatatatacacacatacatacatatacacatatatatcacattttctttattcactcgttgatcgatgagcatttgggctggttccttatttttgcaattgtgaatggtgctgctataaacatgcatgtgcaagtatctttttcatgtaatgatttcttttcctctgggtagataaccagaagtgggattgctggatcaagtggtagatctacttttagttctttaaggaaccccccaccctgttttccatagtggttgtatttgtttacattcccaccaacagtgtaaaagtgttcccttttcaccacatccacaccaacatctattttaattttttgatctttttattatggtcattcttgcaagattaaggttgtatcatgttgtggttttgatgtgcatttccctgataattagcgaggttgagtattttttatatgtttgttggccattagtatatcttcttttgagaattgtctattcatgtccttagcccactttttgatgagattgtttgttttttcctgagcagctacaattctttggcttgttattttagtggttgcttatggatttatagtgcatgtcttccactgatcacagtctaccttcaagtgataatatatcactttagtataagaaacctacatcgtatacttcttccctcctagtctttaagctatgactgtcatccattttattttacatgtcataaattccatagtaatttattatttttgtttaaacaataatattttaaagaggtttaagtaataataacaaatcatatatttgtccatgttgttactatttctggtgctcttcattcctttgtgcagatctagatttcaatatggtatccttcttacttttactgcctaaaagacatcctttaatttttcttgtagtgcaggtctccaggtaagaaagtcttaagtctttacaagtctaaaaatgtatttatttcttcatatccgttattctctttttggtagtatctagttggctgtgacactaatccattaaactttccatttcaattatggtatttttcaaatctagatttctatttggtaatttttcccaatctacttgattattttcatactcatgctctttaatccccttgtttctttacgtgtaagacacactttatgtgatgtttggtgactctaatatcttaagtctctgtaggttttttcctctgtacattgttcctgctggctcttgcacattatacatgtttgtaatttttgaataaaaacttacattccatgaagctgtcttccattttgcttttgccaggcacctggaaggcattaaaaacctgatgtcactttaaatttgcagcttgagactttttaggattatacagcttgtgtgtgaagccaccagtgaaagggctgcccatggttatgtattaatgtatcctcactctcgggcgagatgttttccctcaggatggacaattttgtctactgttccaggggctgcaggggatagaggtggcaggagacaggggaggcagacaggttgattcatagttccctcctacactaaacctatctttttggtgtcctttttttttttttttttttttttgagacggagtcttgctctgtcgcccaggctggagtgcagtggtgcgatctcggctcactgcaagctccgcctcccgggttcacacgccattctcctgcctcagcctcctgagtagctgggactacagacgcccactaccacacttggctaattttttgtatttttagtagagacggggtttcactatgttggccaagatagtctcaatctcttgaggtgtcctactttttgatgtcttctcctaatcctcctaccttggacaggatctaaactttgtctgctattctgctgccctatcatcatcccagactatgaaaagcaagtttcagtatgacacttggcaactatcttaagggtgaaaaatggcatctaattacttctttgggtttctactttcactttttaattttaattttttttgcctttgtgaactcttaattattttgcacctcattgatacatttttttaaaatggttcttgatatgtattccagaaatttttgttgttttctggtccttgtcagcccatgttgccggaaataaaattatttcaacttgttctttaacaatttacagtatccatatattccttcctgttccagaggcaatagagtgagaacacacacttaggagccaagctggcctgagattaagatccaccagcaatgtgacctcaatagcctatttacattctgagcctcagtttttcatagggttggtgtgataattatatgaggtaatatatgaatattacttaaaacagagactggtaaggatggactttcttgttattattatctgaaaaatttgaaaaattatgagcctgagtaacagttatacatcttacccattggttcactaacctctggcccctggctaccccagacccctctaccatgcagtcacccacacccatgcttacactgatggagaggagtcatctatgagctattcactggatgacaggcccagctactgtcacagatgcactccaagtccaggacagaatgctagcagatagctgctggtctgagaaatgtcatcatcatataagcctgagtgaaaacacaacccctttactactaagaaatctaaaaacaaacaaacataaaccaacataattttaaattttgtattttttatgatgtcatttgtcccaacagccatctgacatcaatagtcctgattactaaaaatctcaacacattatagaaatgttcttctcctttttgaaaaccatgtttatttttcccccacaatacagtgctatctgcaaagccttgaactgataacatagctcaggggctaactctatcttagcagagtagcagctgaaaaaagaaagcaattcttaacaaacagggagatcaggaatgctcacttcaaaaacattatttattcagggcaagtgggcaagtggtatttctgatgtgcaaatgaagcttaaacttcagctttaatttataagaattaggaaatgcagattaaatctctgatgccacattgtgaattcagtaaaggttaactaatctacgatgcaaagacaaactttagctatcctacacttattattctggaaatttaatgaaaattaaacaagaagactaacagagtataagaattgtccccccgtcttaacactgctgtttccagcctctgttgcctgaaacactgcagaatacttcagatttttttaaccccaactttttattgagtaaaaccaaagtactaaactaataaatgtgaaaaaggatgttgggcttaaaaagaaaaagcctcaagacatcgagcctcttagatattttaaaagtgaagaccgagaaggaatgcactgttgctaaatagaattataggattatggtcaatttataatcttttcaacatgggatttgaatgttctgatattagatacgatgtacgtactttatttatatagtacctcctgagaagaaaaaaaatcaatattggtttatacagtattttgcatgctattcacgtatgcagtgatgtatacgatatcagagctagaaaatggcttagatacgatttgtattcagcgctgggcgggtccggccccgccaagccccgccccgacaccacccccccccctgccccgcctcatcccgccccctccgacccgccccagccgcaccccttccccctccgccccgccccgtcccctccaccccgccccgctcggcttcgtcacctctgccccgcctcgacccctcccctcctccctgcctcgtcccctccgccccgtcccgccccctgaggcatgcgcggtgctcccggcaggcggggctggctgttggaggaatgtgcgaggatctccgtggccggtgtctgaagtcgtcagtttactgcttgtaatgaacatagtgatcactgggaacctggaagtagagactcctttgcgccgtcccgccgtccctctggctgctgcgaatccccccgccagcctccaggaccccgggctggctcaacgcccccaccggccccgccgccccagggcccgctacgcgcccggcataatgggagaaaaatcaggacggaaaggcccagcccctcgccatgcagacgggaagctcggcctgcacatgtgaggacccttacgccccttggggcttcaccccctttgctggctccaatagtctgggtcggggcctccttgtcctgtgggggcctctgggccacaagaacacaggcccgagccccggcgagctcgcgggcctcccaccagccgtgctcaggctgcacttctgcaccccagccctgcacctgcgggaccacctgggtcacttttccattctgataaagtccccgtacttcgtggctgcaggctcctcaagccccaggtctgtgcagggatgagcaaaacagcagaatatccgcgctacatctttctggagcacccattttactaccagatttggaaggaacaaagttaagtaatttccaggataagtaattaaaattttatgatgaaaaggctggaaactcttctcctggtaataactgtcagacatatctgtgcctgaaatgtcagactttctctgagaaaaaaactgagaacctgtttcccattattttaaataggaaacattatagggcacagcaagtcaatagaaaaaaacctaccaatttcctaattcacagtgtggcagtaggtttaagttgcacgtaagttagcaggtaaaatgcttaaatgttaccacgtggtcacccacatttgatatggttgttaacatgcagttgccttggatgcagtagctttggcttgagaccagcaacatcacacgtgaacctctcctttgtcaacacaccaaagctttttgaagtgaccgtcatgatcctgatggtctaccagttgtttctggaagcaacatgtggcttttccagcaaagtatttagtttaaaatgttgtaatttttgaaagctcaaacattatctctacaaccatcagccgaaaaatttgagacaggttcttgctcttttgcctgaactgcaccatgataggggctccagcgatccacctgcttcagcctccccagaagctgagaccacaggtgtgtgccaccatgcctgttaatttctaaattttttgtagaaattacatctccccacattgccgaggctggtcttgaacttctagactcaagcaattttcctgacttggcctcctaaagtgctggaattacagacgtgagtcaccgaccgcacctagcctgaaaaatgttttgtgagataaatagctgctatacagtttagatattaaaaactaagatgtgttctcccaggaaagtaataattttggatatattctgtgtcacatcctgtatgatgaaatagatggcaaaagaatcccatttaatttaaagatggaagctgtaacttcaagtaaatttggagctgaggagtcctttcgggctatgaccccagaattctggggttctctgtactgatattttgctagtgtccacacacaagcattccttaatgctgtgcgttaaacaaatagaccttctttgaccccagatttctctccatttaccattctgtttctctgctccatgcaactacctcacctcatgtcctctcttgaacccactcctttctagcttttctccagggtactttgctgaaacgacttttatctcagtcatttagctgcatttgacacagatgatacaattaaggagttcctccttgaaactctttcttctggattttaaagaccttccgtcctggattccctctcacctttttcttcatcctcctgctcctcctctaccagatctctagtgatcctctcagaatgatcccacatagtctcatagctttaaataccatccatctgttgataaccactaggcttggggcctcttccctgaggggagcaccaagagtcttccctgactcttttcccttcgcccccaacccccatgcaaccatacagcaagtcctgtggctcttgagtgcaaccagcaacctgattcaccatctccatttccacaaccagtttcagtcatcttcctctcctactggtctactgccaaaaatcctcctactgccaaaaatcctccaacctccctgcatcctatcttgccctcctgcagtccagcctccactcaagcatccagagtgatctcttgaaaatgttaaaacatgatataagcatacccccacccctgtgtaaaccctgccactgtctactcattgcagtagaataaaagttcagacaacctggtgcctgcctcttaagcctcatctcctacccttgcttgttcttgctatgtgggtcagattttccggtctccagagctgaaaacaatcttaactgacaggcattagatcatagactctatctacagcataaggcatggaaggaaaagtctgagagaatgaagggccagaaaagttcatttaaaaaaaataaaaagcacaggaaactggaaacataactaacctgtatgtatatactcaaaagaacatggcagcaaaatgaactctttagaaactgagccaacagacttgcaaatgaatagaaatacctttggtcctactctgaaaacaaaaagaatccttagtgaatatacaagaacaaaaattgtacacatttctgggtcataatgcaataaaactagaaataatcgaaagagaatttaaagatgttcagcttcctgaaaatgtcagattatccttttaaacaaattaatgcctatgtcagggtgcaaatccaaaacacaaataccttgcctataaaaatatattttttcaagcaacagtgtatcaggatgtaaggagagagctcactaactcagaagctcccagagtgaccagatgtgttcatgggaaccggagcactgccctggagtcatttgacatcaccttattacaaacaggaacagccatgatggggaatgctcagatgccagtaataagtcagaggattccctcctgaacgggacctcccagtcctttttggcacagggttccaggtgtgaccacaaatccatgggtgagggctttcaagatcaacctgccctcaggcagtggagtggaaactggaactagcagctacagtggaaaaaaggaatgtcctctcagaatatgtcatctgccccatgcaaagactctggatctcagaagtcctcctggtaaggactcggagccagacaacttcatttcctgtcacctgggctgctctccctctgacagctatggaaattggtgaagcacaggaacgtattggaaatggcaatgatgtgcaatgccaatgtgtggaagtgtacaagttaagtaatattttaaaaacagaacacacagcagtttgcacaatctgatcaaagctctgtcatgtatgtttctaaacaagtttggaagagaatttggaaatggctgaatttttttaataaagctcatgtttttagtttgtttaaatgtaaaagcatacacttagaaacaagttagtacataagaatttttaatcttagctatctggaagcttcaaatacctagaatgaggcatttcccaaaggtctctgtaacttgaattttaccgtagtttgaaaactcttgccaggcatactggctcacacaggtaatcccagcactttgggagattgaggtgggcagattgcttgagctaggagttagagaccagcctgggcaacatggtgaaaccccatctctacaaaaaatttaaaaattagctgggagtggtggcactgccgtttgacacagctactcaggaggctggggtgggaggatccttgagcccgggaggtccaggctgcagtgagccatgattgcatccctgtacttcaacctgggcaacagtgccagaccctgccccctcccccaaaagaaaactattagttcatagtgcagttgatgaaataatgtacatccacaaagaaaggagcaaccataatatgtatataattactcagtattaaaatattgtatatagtattacatatataatattgaatacctataatgaatggggcactgctttaagcactgtatactcattatcccacaagaattccttctcgggtaggtcttagtatattcaatttaaaggctaattagtaagcaatacatagaattgaacaagaagctaaaacatagaaggctctcgaaaatacaatgtggaatgagtaatgcaagttacagagatacatagcacatttatagaaagtgtaaaaacttacaaagttaaacactatattatttagataaacaatatattatttagagatgttattatgtaataaaagtataaaagtcagggaaataatatgttttgtaaagcttcagatgaatgattgtcctagatggggaggcaaatggttacatttccaaagggccaaccatgaagacggcttcaaatgtagtggtgtaggtgatggatacaatgtatttattttacttttatgtgagtctgtgtgtatgtatgtgtgtgagtgtgtgtgcaattttgtatgtataaatatgtagtaatttttttttgagtttgggtgtttctctgtctcccaggctgaagtgcagtggcatgatcacggctcactgcagcctccacctctcaggctcaagtgatgcttccacctcagcctcctgagtacctgggactacaactggtaaatattttgctattatagattcggctatcatgttctgttcagtgcctatttcaatagcctctctgccttaattcaccttcatctgcagtgggacacagtacttcttctctaggctacccatggggtaccccaacagcgttgccaccacatacaatcttcatagagctcttaactgcatccagctttctccaggagctcaggatgccccagaccctcatcgcagacagcattgccctggagcttatggctggagatgatatcaccacagacatccccaacccagccctgtcctgggagcaggattctggcctccctattaggcctcagaaactggctgaccacctggcttcacaaacctgtgtgttttcagggaaaattttgatctctacaaaccatgacatgtagagagggacacacatctgattcagcagtccctgatccgctgatccatggacacatttgcccacaaggaataacctagaatttctctctggtggaggtcaggggcattacatgagctgagtagagcttagtttttaatcactagacataggcaaggtgtttaagttattacgcttccaagcagcatggtcctcactcactcaaggtgagataaatattgctgcaaaggaacaacagctgcattgttggagttttgcttttgaggcgtgtgtgtgtgtgtgtgtgtgtgtgtgcatttgtgtgtgtgtgcgtgagttgatttctttcacaaaatacattttcacatacttccttactccaatctacattgccccttccttttaaataaatttttttgaaaactaataagcctattttatttatttacattttttatttacgtttctttacaaactgtttgctattagtctacagtgaaaagtcaacactttataaaataagattagcatttaaaagcttctcaattctaatactttgaaaggctacacccattttcagaaagtctgggctattcaaaatattttacaaaattctgaaacttcgaaaagctgcaagatttggagacagcaagatgaagtgttttttctaacagccagttttgttcactttattattaaatatgcactttttaaattaacagcttgaattctagaatatatttttgaaaatcactaatgatttttgtaaaaatagaaaatctgttgtacctttatcttaaaattcacttcttatctattttctagatttgatgttttgtcattttaaaggatactagacaagaggatctcaatttggatcactatattgggctcctaatatcctaatataattttaaatcatctcaaacaatgcattattaccatatacatcagcatttcccaaactgtgctataagctatgtatacttttgctatttttgagctaaaatatgcttacaaatatataaaaatataaaaatatatttaggtgttgttatgcaataatgcacttttcaaaaagaaacgatataccagtctcaagaatacccggaagctgcatgaaaattcttgattccttttatatatagtgacagaaaaagatgtaaatctaacaattggttatttttattgtttaaagttttttctataagcacatgtgaattaagtattcattattccatattcctcatgtcaccgacgctgggtgcccacagcactgtttttctaacactgcagctgtgggactgagggtggcagaccagacacctgcactgagccacattcgtcacacagttggaccagccctgagccgggggcagaaacatcctgatgtgaaaagctgtttgctaagtacaatgaccacacgtttcgtctattttgaatacaccatcacaacaaactctacactcttgacagatgagacaggcagatatgatctttgaacacaagtgagaaagacgttcacacagactcccatcctccctcacatgactggaggattaaaatggtggtggggggtggatattcagctcaggggcagattagtgacactctcacagctattttaagatacgaaatatttatatgatcctattccaaaccctaatacataaataatgaactcagaactgtacacaaagggaaacaaaaaaccactctgacagtgtccaggtccctcataaacttcccagaagtcaaggaggtcaaggctggtctcaaactcctaggctcaagcgatctgcccacctgggcctcccaaagctctgggattacaggcataagccaccaaacacagcctagtacgttctttcgatatgtttggaatgaatgtgtttccaaggataaaagcttacaatgacatctttcttacctgtaagatacccgaagagcagagagagggtccccaggctggctaagcatccagaacactgggggagctttaaaaacatagatataaattattgtatttcaccccttacttactgaatcacaatcccagggatggaagcacccagagatctgtctttttagaacttctccagctctccaagtggtgctgacaatcaggcagattgagagccagtgcttcaggcagctcatcccagacctcgggagcaggggagtcacccagagctatgtcagactgaaggttctggtgcatcaggggtggggagggtcttgagagttggcctttccaacaagcttcccagaggggctgctttgctgatcctcaccaggctttgagggtgcacagcactcttcctctaggtgtgtgtccacatacctggcacatttgttgttgcattgccccaggtataaagtgcagggtgccccctctacaccttcagccctgctgtctcccctgctgacccccaaatctctggggcttggacttacctttataaagggagctctcagctcaggggtgggccctccccactggccctcttttcccaaggcccggcatcagcaggagctgctcgagcaattcatcccgaggggtctatgtggtgtgaaaggcttagggagactgttctgtttattgttaagagccaggaaacaaagcctggaaacaaagtctggtattgctcaattcagtggtgataagagacaagggtagggcagggtgcagagaagactcccacacatagcaggaccgagtgagtgccaattcttccttctaacactggcaccaaggagagaccgctgtcccttcccataaaggcagtggacaaatggaagcatcgcttggtgtgccagcttctttggggcaggagaacaataggtgacttgaagcagggttgggagccccatcccaagcacagtggatgctgaagggggtcccaggctccccaggtcctgggcttctcttgattctcagttaagcttgttgattgcatatagttgaatatatataggcgaggaaaagacacaagccaagaactgggggcttcagtcagctctgaaaagtcaggaagagcatttctttttttttttttttttttttttgggacagagtgtcgctgtgtcacccaggctggagtgcagtggtgcgatctcagctcactgcaagctctgcctcctgggttctcgccattctcctgcctcagcctcccaagtagctgggactacaggtgcccgccaccacacctggctaattttttgtatttttagtagagacgggatttcaacgtgttagccaggatggtctccatctcctgacttcgtgatctgtccacctcggcctcccaaagtgctgggattacaggtgtgagccaccgtgcccagccaggaagagcatttctaacatccaaatgcaaatgtctgccaccccgggctgctttcctctggaaactgcactgcagggcacagcaggtcccaggtttgcctttcctaattccctgcaccacccagctcccgcctccctcactgtgcgggatgagaggtccacacagacagttccttctcacctttgaaatggcagtggtggctgcagcctgggagctgaggccatcccaagcgggtgagacccccaccaggggccctgggtacctgccggccacaggctgtgccatccaggctgtgcacagccacgcctcagctaccaggatttccttcctgtggaactggaccttccatccagagagtcttgcagcagagagcagaaatgggctttctctctgctggtgtaggaaagccatggcaggaaggcggtaccaacaacacacagctgcctgtcccacgtggggtcctgcacctcctgcctcccagctttcctgcccctttactttgtaagtgtgctctttgattaagtgtcctgtttttaattgtgtccaaatgttcacactgtcttaagtgatgctggagccacagcctggggccactgcaggtccttcctctggagcaaagggtctttgtcacagtgtttctctaaaagcatatccatcctgagtgacacttattttagaaacagatagaattggtgaaaaaagggttgagcattataaaatgtctctggatttcaaagaagttggccaccatctatggggaattggggatgagtaacttctctttaagtaaatgaggacaggacaggcatggtggctcacgcctgtaatcccaacacttcgggaggccgaggagggtggatcacttgaggtcaagagtttgagaacagcccggccaacatggcgaaaccccatctctacaaaaaatacaaaaattagctgggcatggtggtgtgcacctgtaatcccagctactcaggaggctgaggcaggagaattgcttgtacccaggagatggaggttgcagtgagccaaggttatgccactgcactccagcctgggtgacagggcaaaattccatctcaaaaaaaaagtaaatgaagacaaaatcccaaaggctagagccaccacccagagcaggttcaggatcgaagtgcccctgtggttcccctcccacctgaatgctctgttttaaaatgaaggtccaggacaaggggagagcatgtcattactaaggttcagtgttaaatagagacattcttccactgatggcagccattatgggccacctgagctttctttggttttccctgccatctgcatggtcctccactgcacttgaatgaggagtcctgagggtctgagtaagttgcagggattgctgtgctgccaggagtgagtgaaagaagaggccagagcagccacctcagctaaaaagaaagccagaggagagggtgggtatttagggagcggggatttttaatttcaagtgaattctgtaattaaggaaatggggtggtggtggtggggctctgggctgggtgctctggcactgtccctaacagcagtcacagtgatggctttgctcctgtgctgctgtccctcctccctctcagcaataggaagaacatgtgtgcttttgatgcacttggtgcagcaggcctgggatgccgcatttcacacaagcttcaggtgaccccagtgctgctggttcatggaccacgctgtgagtagcaaggtcacaaactcccctgagggaggggagtagctggctgcgtttctgagagaccctattacgattgaactactttgggcctcacttcttgagaactcaaaacagctgctgggtgtgctgaagccatattcaccccaccacaaagaggacagtcagcacctttctccacacaatggtaaaaaggttttgttttcatataaaacctcaacagatgaatggggccactatcaatgattttcagaaagaaaggctcaaataccaactattttttttatggagtcttgctctgtcacccaggctggaatgcagtggcatgatctccactcactgcaacttctgactcccaggttcaagcaatccactcgcttcagcctcccgagtagctgggactacaggtgtgcgccatgcctggctaatttttatacttttagtagagatgggtttcaccatgttggccaggctggtctcgaactgctgaaatgaagtgatccacctgcctctgcctcccaaagtgctgggattacaggtgtgagccaccatacccagcccccaaataccaactattctttaaaaaaaattatgattatgttggaggcacagtggctccttctgtaatttcaatactttggaaggccaaggcaggcaaattgcttgagccctggagttggagaccagcctgggcaacatggtaaaaccctgttcctgcaaaaagtttttaaaaaattagccgggcatagtcgcattcatctatagtcccagctactcaggaagctgaggtgggaggattgcttgagctctggaagtttgaggctgcagtgagctgtgatggcaccactgcactccagcctgggtgacagagtgagaccctgtctcaaaaaaagaaaaaaaaattttatatatatatatgtatgtatattatgttgggagagatgtccctcataattaaactaggttaatacagatgattttatttaatagctgaaatggttctgttacctgggagtttgttttatatttagttgatcttggaggatccatcatgaatcccccctagaagtgcccacagtgacatgttccatgagtgcttgatggaaagccatgtatttctaaggctctggtggcaggtagcagttatgcgatggcatgaggaaaatccatttagtagagttgtccaaaagtgcaatggcctggcttggtaagctgtaaattcagtccctgtgaggggtagaaagtgaggatggagaaggaaggaatatgccaaacaggggttgaacaagacgggcttcttccagctgtcagttttgtgactatgggtactgtccatgtctccaggatccacctgggatgcctctgataatgtaaccacgtacccccatttttcttgggcagtttattccaacaagtgagctatagtgcaggcattgggccatgtggtatctgtttgactttcaagggcttaggtcagcttggtggagttctctgggtccctctagggaatcatccaacccagggatggcctgcagggtcccaccccacccctaaagcacttacattcacacaaaatcctagagctgaatgttctcagcaggcttattcctcatagccaaaagccagaaacaaatccagatgttcttcaaggagcgagtggcaaaacagttggggtcattgtggaaatgaagggaagcctttggagagatgtattggaagaatgaacaggactcagtaatggattgtttatgacgtgggggggttacaggctgaagaaactctttctagagtctggaatggagtccctaggtgagctgtcacaccatttatttagacagtaagtctgggtcacagccaagtccaggaagatgacctagactatagagtgggatcagttctaatctgtaatgtctaagaggtatttcagtctggaaatcagctaggcagctgtacatataattctgagtggagataaaatctggaggttgtaagaatagagttaataattagtgccttaaaaatcaatttggtcacccagagggcttggggttctttttttctggcataccaataaaagaatagcagagttcaggggtgagttatgatgcacttcagattttaaatcccaagcaggggttgtaagcatgctggcaaaccttggggaggagcatccagaaaggcaggatgagaaggagaagcattggcttcaggagccaggagcaagatggaccccagaaacaaaaaggagccacttacctggactgttcctttgacgtggtaaatggaaagtggccattagattttccatcatggaactgtcaaaggacaaaagtacaacagatttagtttaaagatcctaattggctttatttgctattctagaatcaggcaacagttcattccataaaacagactgagcgttcctccgatcagagatggggagatgggctttatggatagaaaaggctgaagcagaaacagagaacaaaacacagattggttgcaaagttactttccttgtaaacattaaagcagaggggagggactgcctatcatgctggctaaacctggcctgttggggatttgcctgttatctctctgtgtcctgacttctcagaaagtcagatcaacaacttcgttttggtttggaaaagtggaactttagcgcaaggaactccaatccagtctggtcttgttactgaaatgaacctgggtctgcttgccccgtgtggtaaaaccaaacacccacactgaggtttgcagcaggagaaaggagggtgttaacttgcaggacaccaagcaaggagaatggggcagcttacacttcagacccaatctcctggatggcttacaagcaagggattttaaaggcaggggaacaattcaggaaagcagaagttacagggaaaccataaatcaatacagagggtatacattgttttggcccaaaaaggtggaagctcttgaagcaaggggcttacaggtcataggcggtttcaggattctttgattgcaattggttaaggaagccaggctttgttgaaaacttggggtcagcagaaaggaatgttaagatgtggcctgtgggcatgactccctccaggcccctgagaaagaaatttacaacaaagagcagccatcagagtgcagccctcagctccccgacatctgaggtctctgtgatgatggtcagtattttccatctgacgtgggtccgggtttctgaaaaaccattcatggacatatgctaagatgtaatctttagtttcaataggggaccaaacaccttgtggctctgacttacttgagtggctgttacttgaagctattattcccttcttgcttatcaggtggctcatttacttctcaaggccagctaggtacctggaatttcccttgaaggaaatcaagattttcctttgtttccatgctggaggaggcccagcaggcctctaataggggtccatgctccgtctcagtctgttgggcctagtgcagaagctcagtccaaactaatggcctcctgtaaatgtattttacagaagtcagcagtgtccacagcaagggagagtttcttgagcaacctgctgggagacctaagagtgaaataaagagtgaatgtcaggtgaaaacattgaaaagatgaggactgacaagtatttacagggggttaactctgaagtggttccaataaactgtgatcttgaaaagcaggtagtggagggaaaaatggcttccccttctaggttctttggctgggctaggaattaaattgacataagacgggctaataggagaataaaaaactttaattacgtctatatgcacaggagtcccacaaaatatggatgaggagaagggccagatgaatgaagcttagatagtgtcctgagttacagaaaggaacaggggcttggggcttgctgaggatgggcacaagttctgggagggtgaggggaggcaatgtctggtgaataaaaggtgtcttgttctgcagagaaaagtctctggggttatagaagttgtctggaaccagccctcttcctgatacagataattcactaatgtagattttttttatagttataaatttcttttacaaaagggcagcttttcagagctactcctgtgtctgcaatttcttagaataacaagatcaaaatttgcctaagaagtatattttgtgttcacatatctggttttgtattgtcatattttggggtggtgtgtcctgagccccaccagcaagggccatgttataggaatataatttttaattgactttttagagttgttttgaattcacagctgaaggggcttagagtataccatcccaaaatatgccactctgacataaagattattttgagctgaagacaactgagaccaagtagacacaggacaaactctctgccctgtccccatctaccagaagggcaggatggctcttaccagcccagaggtggcaccagaaaaatcaacatcacaagcacgccaaatcaaccttatctgtcagcttctgccatatatctaccttcccacaacttgttatccacagaagctcaaggtccccttcctttgtctttccacttctctacaaatacattgctctctcattagggtgctaataagcccaagttctaaccgcctttttgagttattatcactgagctctcccatgtgtatttgcgatgcatgaattaataaatgtgttgttttctcttgttaacctggctttcattggtctaaatttgtggggccaaggcactaaacctaagatgggtggaggaaagattttttctaaacctatacagcaaaattgagctgagcgtgcagagaactctcatatgaacccctcaccggcccacacatgtgcacacacacacacccacacacgcacagcctgccctactgtccatgtcccacatcagtggggcacatttgttactacagctaaacccacaccaacacatcattttcacccaaagtctgtggttcacattagggtcactcttggtgttgtattgtcagtgaaaagagccaaactctgtaaaatatttgaagagatttattctgagccaaatatgagtgacccaaggtatagtctcaagaggccctgagaacatgtgaccaaagcggttgttttacagtttggttttataccttttaaggagacatgagacattaatcagtacatgtgagatgtacattgattcagtccagaaaggtgggacagctcgaagggggtcaatgggaggaaggcttccaggtcataggtggattcaaagattttctgattggcaattgattgaaagagttattatctaaaaacctgcaatcaatagaaaggaatatctgggtcaagataaggggttgtggagaccaaggttcttaccatgtagatgaagtctcatgggggtcacccttagagacaatagatggccaatgtttcctattcagacttttaaaaggtgctagactttcagctaatctctagaggattgggacagcctggaagggaaaagagctagttatggtaatagagattctttacaggtgcaaattttccccacaagagacagctttgcagggccatttcaaaatatgcaaaaaaaaatcctattttggggtaaaatatttttatttccttctttatctgtcatatgatgttatacgagagtcaggtgggaaagtaagctgtgttatatataaggttaaataaagcccatctgttgagatgtcagtttctagggtatgactccccaggccccttagataggaatttgggcaagagagaaaaaatgtcagtttagtcctcagtacattctttgggtttgaacagatgtctaatgccatatccaccactgtcatatcatacagagtagtttcacagtctggcaaatcccctgtgctctgcctgttcatccctctctcccccaacccctgccaaccactgctctttttactgtctccatggttttgccttttccagaatgtgacagagttggaatcttacagtatgcagccttttcagatcagtttctttcagttagtaatatgcatttaaggttctttcatgcagctcaataatgtttggcagagactcaaaggcagggagaggaatgggaaatctgcggtggaaaaggggaagaggagtcctgatggggttgccagccaccagaggcggctgctagtgaagtggcctcattgtctggggtgacacccaatgttcattgtctcacagccacagagatcaagggcatggacacacaaagggtgaggttaagagtggaaatttaatacgtgaaagaaagagaatagctctctgctacagagaggggtcccggaaaaataggtcgctgatgcacagtgcaatgcaaagatttttatagatgagctagtggggagcagtgtctgatctacatcgggtgtgaaaaaacaggaccaggtgtgccatctgcatagggcacgaatctctggacgcccccacaccaatcttctatttattacgcaggtgagtagctactccatgttgcttatttctttcttactgtgcatgtgttaacaacaacaaaaaaaaaaaaaattagggaaggtgaaccccccatggtggacatgcctggccccaggtagtcctttttatcagtgtggctgcaggcctccccccaggcaagcttccagcttccttaactatgtttgcagctccatctttcaggctgctctttgttagaaagaaatgatttcttgggctgttttttgtcagaagttctgccaaggacttttttgccctatctgcctaaataatttatttccatctcctgtatccagtcaggggatcctacctgactggtaagagggtgcctatttggttctccctgttggtcctaggttcgaagcaagggcaaaaaggagggaagccgtcagtgcagtcctgaccattagggttgctgtatgcagtttccagctggttacttcacagactgtgggtcagagtgtcaccaggctctcgggtggattttttaaatcccacggactgaaacccttctttattatctccagtcacttgaacatctttctttgattgacagtttattcagtgttattaaaaaaaaaagctgctactattactactactactactacaattactatttataataatggtaataattatagtaatgatgaatcccagcaaggaccaaataattataattactgatttaatatttatacataaatatttattaaaatatataatctatatattacatatatttataccatgacatttatagtatctacataattacatattatttgtgtatttatgactatttatatttataaattacataataataagaagaatattattactatgactactataagcctcaggactccccccgccccccaccataacagaatatacccctttaaccatccagccacctaatcccacgttgcccccgctggtcgagcttgctatatataaaggcggctgccaactgttgcaagacaactagctaaaaagcctgccgaacagatcgggatcgcgggtgggcaggtaggacgccaggcctcgtccgggtccacctcaggtcacattcccacctcggggcaccctggcaggcatgagtggaaccgtgagatccctggtagccaaaagaagccttggaaaattttggggggagcgccctgggccagggacagctgccgggcaggggacagactccccagcgcctcccgggccagctgcccacccagagtggacttcaaaattcaccggggtcagcctgcctcagcctccccaggggcatgtagaaatttctgcggaccgaaagcccctcctgcgtcctcttcggaactataactgtttatatctaattgctatttatgtagattgattatttataaagtataatttatacttctacaaatttatattatttatattcatatagtttgtaaatgtaaataaattatttgtttataatacttgcttataagaattaccattgctgtataaacctcaggttccaccatccccctgcccctaccctccccttcgcaccttgccacgtccttctcccctcgccttggccccttctcctctcccaaattctagttgcccatctgcttggttgggctgctgatcgatctgatcaactttctgaggccacatcaaaactgcagaaatgaggctgatcgacccagcagctctaacaaagatcatccatcggacatctggtcgcctctctattttggagccagaggctgtacgctcttccccggtggggagggtggggccccaaagtccaaccacaagatcccattttgcaggccgcggctaaatccactgcgccttccccgttttttctcgaactgcccaagccagactccacctccaagacaagactcggaaaaaggtgtgaagctcaagtcggatgaccacgacccacgcgtggccacggacgggcccatgttattcttcgcagtcctcctgtaatggccgggcgggtcctcgcctccagggcggggcttggagataatgggtgtaatggaaggcctgaggacccggccccacgccagtcggagtccgggcggagtaacccatcccccgttcacactctcggaaggcccgtcgattcctgcgtgtactagtcgacccgctcaggccacagcactccgagctcaatagtgcgcctccaacgctgacccgcaggtttaatctccgacgaaaggacgaagagtacacccggcaaagccgggctcatcctgccagtgctgccagtccccttgaactctgcacggcgccctgtggccaaatcccctttcttgccggcttcgccagagcgccggagagaaaaccttaacagtgcagccaggtggcgcccaacagccggcgcaagcagccgcggatcggatcggcatagccagcgggcgaggcctctcctagtccctgaccacctgggatcgcgtttcttggcctgggccgggtggaggagctcccagttggcacggcctggaatgacgcgaccccgcagccgaaggggacttgaaaatttttcctaaccaccgttccgctccgagttactgctacctgctaggacagacctcccacgcggctccgggcctggcgatcttccgcgggaaccgggaacgtttccggagatccccgcaggccggcgccctgcctcggcttcccagtgcagcggggtcgcgggctccccgaggattccaaagttttgcggggcgcctgcggcgggagggaccctgaagttgaaactgtgaaaggcagaacgtgggtgaatcgcttttattctgtcttttcggagtgggaaagcctttctaaagcataaaataaacccagaagccatcaaggaaatgattgatcagcttgacaacataaagtttcacaagcaacgtcaaaagataacaaatgagtgtggggatcgcttatgcataagataagaatattgatttcattcacaatagccaagatacggaagcaagctaagcatctaccagtgggtgaacggaaaaagaaaatgtgatgtatgtacatcagggggtactatcccgcctttgaataaaaggaaatcctgctattggcgacaacgtggatgaacgtggaggccattgtactaagcaaagtaagccaggcacagaaacaaataccacttggtctctcctgtatgtggaatctgaaaatagttgaactcatagaaacggagagtagaactgtggctacctgaggccgggggaagggcaggagggaggagatgttgttcaaagggtacaaggattcagttagacaagaggaatatgttttagggatccacatgacacggtgactgtagttaatgcattttatatgtcaaaatccccaaaatagtaaattttaaatattctcaccacaaaaaataaatgtgttggtgatggatgtcttaattagcttaaagtaattattccaccaatgtatacatatatcaaaacatcacattgtatcccataaatgtatacaattatgatttgtcaattaaaaataaactttaaaaaatctttttaaaaagatttcagcattatttactataataacaaaaaaactggggtgggggtaatagccattgattaagaggggtcaggttaaataaactccagtacatccacaccatacactgtgtgaatttgttttgtttgttttagatgagataaatgttgatgatgaaatgttaaatgaataatttaaaacaagtattaagttacctctatttcaacacattaaatagctagtaaagactgtgtggtgtggacagagggatatgatctacagaaccgaaaagagaccaaaacaaatgcacccagctggtttttgacaagcatgcaaaagcaccttgtggcaggaaaggtagcctttccatcaaatgggagtagggcaattgcacatcacaggcagcaaacaagcaggcaaaccaaaacccttgacctagacactgtcaactttagaatcccaggcccccaccaaatgaatggaccccctcttggccaaggggacctcaggaaaatcttaaaagtttagttctagtctgcctggggtgggaggtcaaacatgcctcattataccccctgccttttggggtttagaccagcattaatgttaacatagagatcagaagactgacagaacagactctgtggcaataaaataccaagttataaacaggacctaaggccatgccaggcaagggttaagtcactaacactacgcctaaagaataaactgtgttccaaggaccacaaggcttttgtttttctctggcagctaaacaaccactggcctcaagatagacaagattaaaacaatttccagctccaccacccactgacttactaaacccctgctctaccagccataacttcctgataagaccaccaactatggattgtctttggctggtttacagaggctgcacacttgtgtgacttcatgccctgaaaagacctgttgacatataggacctaactgtaatacatttaaatgttaagtctccaccccaaagtgaacatggatcatatgctacatgcatgtctgttcaatatgcatgtgctaggaccaccttcatgaatattcatagctcctcctataacctgttgaatatgtatgtttagccaacctgcccagcataaagctcctaccctaacccctcctccttcaaagtgccgtttctggtcccttggctgagatggccaccttaaaggctgtaatccttatgagaaataaagtctcctcatgtttctaaatggataaattgtgggggttttaccctcacacctcatgcaaacattgactccaaatggatcacatatttcaatgtaaaatgtaaaactataaaattttaggaaaaaaaatcttagagaaaattgggatttaggctaaaaaatgagattttatacttgacatcaaaagcatgattcataaatagagatgggtaaattggaagtcatcaaaattaaaaccccaggctctgtgaaaggtccctttttttttttttttttgagaaggagtctggctccatagcccaagctggagtgcagtggtgcagtctcagctcagtgcaacctcctcctcttgggttcaagcaattctcctgcctcagcctcccaagtagctgggactacaggcgtgcgtcaccactcccagctaatttttgtatttttgatatagatggggtttcaccatattggtcaggctggtcttgaactccagaccttgtgttctgcctgccttggcctcctaaagtgctgggattacaggcgtgagccaccacacccagctgaaatgtccttttaagaggaggaaaacaaagtatagatcagaagaatatatttacaaaccatatattctacaggaatgtgtaaaaaaaaaaactcaaaacgcaacggtatttttcttcaaaatccaattacaaaattgatgaaagacatgttaaagtatgccccctgcagaaagacaaaatgactcccaggagactaactgagttgctcaaagttaaaatggaaccaggcggctgtagctgggtgacagagacttcatgtactctgtgttcttagaaagatgttataaaagtatcacaagacctcccttccacaaccaaaccaaaccagttcctgttgtcagtgtcaagataactgtatccggagcaccacttccctggacccctgacagccatttataagaaatttctgacagtcttctgcttaaggcttaaagaacaacaagtcagaactcccctgccctgactaatcaggactcaactgcatcaatcagggttcacctggatcgactaatcaggattcagctacatccaccgatcaggacagcatgagtttcagtccttcatttacataaatgaaagtagttggaaacctggacagaaacttttaccatagagcccaaaccctttcttagttttctagaacttactttccttttacactgaaggctgcaacttccccatttacaaactgttcactgaaataaagtcactttccacattccttttcagaaaacttagctcacagacacgaactagcatttcactgagcaggacgtacagatggcaggtcggcacatgagaagacgttagccttttgtgggagtgtaaattaaaatgacagtgagacgtcatgacacatccatcaaatgccttcaacaagatacaggaacagcatcaaatgcaggtgaggctgtggaggaacgggctttctcacacattgctggtggtaaggtaatattgtactgccactctggaaaacagtgtggcagtttcaaaaaagaaaacagcaacaacaaaaacatgcaagtgaagcgtggcagaatatgccaccccaaaatatgccactttagcataagggttattttgagctaaaggcacttgaaaaacagcagacacaaggaagatgccctgacctcccctttttcttcctgaaagtaggaggtgaatctcccatgggaaaggtgccctccctgtaccaggaggaaggaagcaattcttaccaccagaggcagggagttggggccgaggggaatctgtacaaacaaatctcgttaaactaaccctcatctgcctcattacttctccacgatgaactgccctatcccagactccattgtcttcaggttttcacaacttactctttgtccaacctagtatataagtgttcaggcctaactgcttcttcggatctctttttcctacagggttccattcacatgtgcaaatctgtgtgcttttctcctgttaatgtgttttatgtccacttacctcttaggcccagccagaaacactaacagtagaggtaaagttttgcttcccctgcataaggaccatgtaacccagcaaccaaacccctgggcattcaccccagagacaggggaacttgctgtgcttgaagggttgattcagtgcctctggggccgaggactccccctgacctctgaccctgggctacagcaggaattagaatatttcccagcctgaaactcctctttcctcaacttcagtcaaccagacaccctttgtggatggaaaaatctcattcagtgtttttataacaataacaaataataatggtaatcattacaataatgatgaacaacagcaacaataactattattattattaaccttgggggatgaaagggtagggtacagacctccacaatgctcctggagaatgaccacctactcctgctgggtcccagggtgggctggggtcagagtcccaggtttgcacgtgcaacatgctctgtgaaggcaaggggtgagcagcaggaggaaagggaaattaccctaacagggtgtggcagaccagtgaggaccctgggaggagaaacaggggagggatgtgcagggagagggacccaggtcgggcacccgctgcctggtcagtgagctgccaaagcttcctccacaagtgctggactccttgtccatgcctgcctacccggcccccggccagcaaaccgcgggcaccagctcatggtgcacagaaatatgcactccagatgaatcgcacacctcgatgttaaacgtaaaagagaaaacctcagtagagaatgctaagcgtttgtgtcccctggagaaatgttcttcagtgtggcacagcagaaacccaggtggtcagcagccccatctggtgtggtgccagggaagagcgctgacttgttagagcagcctggagttctgcctgctgcgatccatcacggcggcctctgcatctgcagggtaaggccttcaggtttagcactgcaaacccaggcatttggagtctgttgggccagtatcgctgctcaggtgcagatgggccagctgacttcacctgaattgtagctgccagccttcgtgagaagtgggggcgcttctgggaccggccggctggggcatcgggtgcaccatttctacttgaacacacgtcccccaggcacttggggcccccaacacggaaagcggccatgaggtgctgggcctccctctggctagggggagcaaggagacagcgagtgtggcagccaggactgggcctcagtgctcccagcgggtgggggtgtgacgggtgtagtcaggccaggtctgtggggaaggtttgtaggactggggctgggggctagccttgagtcctgagccacccaccagtggcaaactgcagttttgcagaggttaagcctccggcacctctctaaggcagctaggctgggacaggactggcaacagcagcaccaacacctgtgtgtcctgagcagggggtactgcactcaccggctccaaccagcaacgtcattaacgtttttctccactgtgaggatcatgcaaaccctaccagtttgattccaatgttttttgaaaaacatacttgaacacagagctgggagttttgacaggtaggctttaggagctttgtcaccaccaccaggacacagggatctcccggcaaggtgctcagggacctgtggggcccagaggccagggggctgggagggcctggagtggccagcagggaggctgcagagccatgcctcctcctcccctaatcaccccagcagaccttcctctgagaagcagcagaccagggagggggcatgtgtcattctctgccagtcactttcttctccactccaccacctatgcatttaacacagaaagtgcatgaggccacgctgtctgcagtcagccaccgccactgctccatccaaggactctgcactggaggccagcaggatgccctgggcttcctgcaggggctaagccatgcatgggtcccagtgcagtcaaggccccaaggcagtgagaaaggttcagcctggaggtgggtggttaggcataggtcctcgagagtccctttaaggtctcaatcctagtatcgcgtggggtcccattgctgtggttcaaatttctcagtctttcccttgattttgctggttttgcctctttacagattatttccttttgggttttctctacttctaaagaattttttgttgtaattatttcagacactgcctgagaattgagattttatggttttcaagagttacggttttcaatacatcttcatgttccctcatcctattctcctagaagttggctctgtgctgttagctgcctccacacatgtgcccttcatttgttaggactcaagtgtcacatctgaaatgggggctagcaaggtagatctgcaagacctatcccttggttgaagtagcaagccctggagtggcccagcaggtgctgataagctgacctgtgagagactgaatatacaatgacagtggctagactacataaaaaatcaaactctgagccataatctgcagcaaccagccccaaagccagcccgagatctgcagccacagcccaggaagccagcccgttagaagtcagatgtgcaggaagccagccctctagaagtcagacgtgcaggaagccagcccgctatctccagtcaatccagggagcttaacaccgccctgtaacaatcagcccaagacagtcagaacttgactaataacagcttccctaatttttgtcccggcttccaacttagaaccaaccagaaaaagtgaaatctactgccctaaccgaccacacaggaggccccatttctggtcggccaccccagtttccccaagccaacagcctccactcggagtgcacctggagcctcccctttttccactgtgaacctttcccatcctctgcctgcctggaaatttctaccaaaatgcaactggcgatggctgactcccttgctggggcctttgtgtctctcatttgagtggtctttgcttatctccatgctgcttgctatgctactacggatgggcatttcctgcccatccacgaagatttcacgtgcgtgcctggggtggcagcatacccaggtgcatttctcctgcctcctccttctctctttatcccgcagtcttcctcctcacccagctagccacaggtgtccacatggagcacagtctgaggagagagcagggtcaaacacagccaggttctaggtggagctgaatggggtttgacaggtgccaggtgctcccccagatggatctttacatcataaaaacgattttgtgcttgaagatgtggcttcagatccaccaagcataaagtcaccacctgaaattagaaagaaaacatccaataaataggccttcttcactccagcaaccctctccccatgtgccttctgaagctcctgcagcaagcctgcagatgggttcagaaagtgtttccaagaggagcaccacacagctctaacagacagacagacagacacacacacacacacacacacacacacacaccgagtcaacatgagggtaagaatgaggagagtgatggctgcagtgtctgagagaatttagtctcaaggattaagggaaggctccccaggcgagtgggaaaggtgagcagtgttcggtctctcagaggcgtggatggaagtgtcgtccaggcagaagacaaatgcacaaggcttgaagccggagcaaacagcttccatatgcaggagtgaaaatggcaggcacttctatggcaaatccaagagtgaggcaggagggttcagggcctagcatgccaggccagtgactttgtggaaccagcaaaccaagctaggcaaagtgtggcatgttacttccttataatatttttaattagaatcataatattttctctttaatgcaaagaataaataaattcttaaataatacctagcccaagggccactatccagagacactcaagctgccagaatttttaatgtatctttcaagaaatattttctatataaacagaagcctgagatgtatatgccattttttgtggtctcttccaccaaaacttcctcaaatgtattaagagcacaactcttgaaaacatgttcccactgaaacgtgcacacaaacgttcttagcagcatcattcattatagccaagaagaggaaacaacccaaatgttcactgactgatgaataaacaaaacctgctccatccacacaatgcgacattcacacgtgaggaatgccgcaccgtggtgaacaccagaaacagcaagttcagtgaaagaagcccgtcataaataactccattcatggaagtgtccagaataggcaaattcgtagaaatagaaagtagatgagcggttgcttaggtctggaagggatggggagcatcctgtcaggatgccgaaaatgttctgcaattgactggataatggcttcacggctctgtgaatatgctaccaaccgctgaattgtacacttcagtggtgaattgtttgaaatgcaaatgacgtctcactaaagctcttattaagaaatacatgagttgatggcagatggctatcaggattatgagggtgacatctcaggggaggagctgtgtgtgtggaggtgctagaactgcacaggacatcagccattaaagggtcctctgatctaaaaataggaattgtgatctgagtaattaatgagacactggctgtcctgaatttgcagctagtaaaaaagttgtgagtcaggaacaagcttggtttttccataacaggattttggctgctgtataagagaattggctggaagaagcaccattcacaagcacttactgtcaagaagcaagaagcacaaagcacttatcatcaagtaagaaggacaggactcccagtaagggggtagcagagagatgttggcaactggacagatgcacaatacacttgggaggcgacactgacagaacatgtctctggggacatgcaagaagaattaggtaaaagcataggttatatcagggtatgtcaaaaacagtgacaggagcaaataaataatctaaattgaggaatgctgatttgagaattctcagacatggattactgatggaaaagccaaactctgtaaaatatttgaaagaggtttactgtgagtgaatgagtgaccgtggcctagggaaacagtctcagagggcctgaggaagcgttcccgaagcggtcaggttacagtttggttgtatacattttaaggaggaaagagttctaggcaaagacataagtcaacccacgcatggacggtatacattggtgtgacctgaataggtgggacatcttgaagcaggggtttaaaggtcatagatggattcagagattctctgatttgcagttggttaaaggagtgagctctgtctaaaatttgatgtcaggagaaaggcatgttttaagttaaggatgctatgtagcaaggttgatggcctgcaggcctgaataaacccttgcctggcatggccttaggtcttgtttataatttggtcttttattgacacagaatctgccttgtcagtcttaagatctctaatgttaatgttggagagttgcacctaaactccaaaagggaaggagtgtaacaaggcttgggatccccttggtcaagagggggtctgttcagtcaatgggtgcggcttaggattttatttttagttcataggatggatcagattgtttttcttttgtgattacaaataaggctgaggccaagcatagtggctcatgcctgtaatctcaacactttgagggttgaggtgggaggatcgtgtgagcccaggaattcaagaccagcctgggcaatatagggggacctcgtcgctacaaaaaataaaaaaaataaaaattagctgggcataggagcccactcacgtggtcccagctgctcagaaggctgaagcaggagaatcactggagcccaggatttcaaggctgcagtgagccatcgttgtgccactgcactccagcctaggcaacagagtgagactgtctcaaaaaataataaataaataagcaaataaataaggctgaaatgaacagcctcatccatatcttttcatgaacacccaccaacttttccctccgaatagctttctaaagctttcgaatagcttatttttaagtcatgcaatgacttgacaaattgcgtgttaggaagcctgttacgaatttagactcctgtgctattttgaaatagatatttggtcttcatccccatccccacttcctggcaaaaagctcctaaaacccttggaatctgcagagtactaagagtgtcatttgtgtgctaatgaaatgactggtggctggggaccctagacagcttcaggatgggggctggccaccagaaagacagaggtgggattagggggttgggactttcacctcacttgccaacatctggggagaggagagggactgaaggttgagctgatcaccaattgccaatgatatggtcgatcgatcatgcctctgtaatgccgcctcagtgaaaacccgcaaggacagggtttgaagagctcccagatacctgaatacatggagcctggagggcggtgtgtctggagcaggtgtgggagctctaagccccttcccagatgcctcaccctgtgcacctcttccatctgcctcttcattttcatcctttgaaatatcccttgtaataaatgaataagtgtaagtaaagtgtttccctgagctctgtgagccactgtagcaaattaatcaaacctgaggaggggatactgggaatcctgatttgcagccagttgggcagaagagcaggtcacaacctactacttgtgactgacatctgaagcggggacagtctggtgggactgagcccttaacctgtgaggtctgacactgtccaggtagagagtttcagaatggaattgaattaggagacactcagctgttatctgctgaaggagtggttgatgtggagaagtctctacacattttagtgaccggtgatcagagaaacacaattatcctttggtatcttcaaatggattggtcccaaaactcctcccctggaagggttttggtgatttggacaccaaaattactggctgctcaagtcccttatataggaaagtatagtatttgcatataacctacacacatcctccacatgctttaaatcagatgtgtccaatcttttggttttcctgggccacattggaaggagaattgtcttgggccatacataaaatatactaacactaacaatagctgatgagctttaaaaaatcacacacacaaaaaaatcatatgttttaagaaagtttacgaatttgtgttggagggtaggccacagattggacaagttgctttaaatcacctctagattacttatatctaatacaatgtaaatactatgtaaatagttgttatattgtattgttcagagaataatggcaagaaaaaagtctgtatgtttagtacagacacaatcattctttttttcaaatgtttttgaatcgaggttggctgaatccatggatgcagaacccatggatatgaaggagtgactgtattctgtgtggaatttatgctgaatgggttggcagaacatacatattcaataagctataggaggagcaatgaatatttatgaaaggagaaacgtgaatgtgtcattgagtttcatgactcttcatgggtcatgtgttcatgggagggtgtagtttttagcctctgacatcaaaaggcgaaggaggggccaaaaaccactcactgtgcatcctctgtgagccagccaaaactggtccagaggcagtggtccattttaggaaggatgcactgtgaagctggtgactgtcactccaaaactgcaaagaggtagggcgagtccagccacggcctcagatgattggctaaagatgataaaggaaggagtcctgtgtttcttgtttaccagagctggtttctgcttactccttaggaaagagttctggctaaaggttaatatggaagggacatgctgaagtctgtctgaccttgcatcccgtcctggccaggagctcagtttttaagatttctctggggtccctttggccaagagagtgttctatcagtcagttggggaaacttatgatttaaactttattccttgggtcagtttaatagaccttgcaactttaaaataagcattatcaggtctaagaactcagtgtgtgagcaccactcaagcatcacaacctgctgccaagatgctaaatgttgtaagaaaattaataacttaaaggcaaaaactgacctccatgaagatgaaaagtctgatggcactgtaactctagagaaaggagcatgtgtccccattgaggggaaggcagcgtccatttcagggcacactgcaggcatgtcagggtgtttcaggagtctgccaggtgtcctgtcttgtcactcgagactccagcccagggacagacagaaaaccagaagacagcacctcctggccaggatcccagcatccatttgagggagacaagatgagaagggacaatattgttgtagcaaaaataataggttctccacttccttacataggaggaaattcccacaccttgataggaggcagttccccttcctgcccaccttggcacaggcggtcacactccccacctgtatgttgagggactgtgcaagagggcagcactgtctgagttgggacatccacaaccccctgctcctgcccacccttggcttgagtgctggcgacggcaacgtcccctctcagccctggcctgaggtcctccacccttcttcagttctctctctcaggcctccatcatcccacagcttttcttccaatctctcctcttttttctttttgatgacgtttcaaaagagtcagcattttggaagacaactgtagacttgctttcaaatgcagagcatcagagagccatggtctgcccacaggtggcctgcagcagggcagagctgtgcctctgatggccaagggggaggtcacacttgctgcctctgtcctccttaatgctcctgtgacacaattagaacaaagcctgactgccgtgatgaagaagaggtgaactcatgctggtgggtgtcttgtccagagcacgtcagccaccccgtgagttggcagagccaatgggcagacacacaggatgaggttacaggaagatgctctcctgcagcagatccaaggagacagagaccccagcagatggcccgagaagctcccacctgcacctccagcatcaacaggcagacagagaactcctgttagaggggatgaggcaagtctgggacccttagaagactgcaggaagagctgcagatggtgcgaagcaggttcactaatgaccagtccaagggaggcctcccattgcatggagagcagcagagaccatcgctgcccctcccacaaggagtagttggtctggaatatttgctacttacaccttatgaatctcccagttactcgttggtgtgcttttaactaacatgagaagcagggactgggctgtttgttgagtattatgtcttgatattttttagttcagttgtacatgttagtaacaagggtaggggtgcagggtgtcctcatgcatggctgctataaaggtcatgagcaatcaaaaatagaaataactatttccattaattaggatattattgtaggatgaaggtggagaatgtatgctctgaacatgaaaaagagggcttggatcacagctctgccttctgatattttgtttgtttgtttggagcaggtgcttgatcctttaggtagaaagcaagcttagtgaagttaagtgattgtccaaaatcatgctgcttcttaccagttggctagaattcaaacccgagctgacttaaataagagcccaaatttacactggttatgtgggagaggggttgcttttgtttatttctcattactgtgaaaagacatcttatactcagtagaggatatagagtctatttttatactctaaaaattataatgacatgcacatgcatgtaccatcacccactggagacatgcaccggtccacctgcctttgcagctctcatttcacattccagccgcctgctacactcacgtcagcggtgcatagaagaacttcggttatttctcgtgtgagagttcaccttttgcaaaggctgacaggaagtggatgatgaagaactgagttttatgtaaaggagagggagaggtaattgatggatcatggctgagtgcaccgcagggaggaaggatggagggcacgggtggaggggaaggtcatcatggcagagacggggacatctcagatgagatgcccagaggtgtaacaactctgataggaagctgtgctgtgtgccacatgcctctgcaggctgcagaccagtttggatcttactggtctatgtatcaagatatggagtgagcttaccctctccagactgcaattcctgtgagtttctctcttctccttggaatctgagtttgttggttccagagtagctttccagctggggatctggggtgagatttcaccagccaaaggctgttggaaggcaaatcaggatgttgggtatgggctgggctaactgcagggctggactgagcactggaccctcagggtgtcacccctggggcagggtgggctttgggaagaacacagccctggcaggtgcccacctctgcttagtttgtgctggttgctatgggagtgaaggggccgccaagtggtagctccaggtggggctggccctccaaattccaggcctataatttatctggcacatataacccctcatttgaggcttaatttgtttccaaagccttgagtttgagagatcttacaaaacttttattttattgtcatcatattgtgacaagtgaagacatactccaacaaaaaattgaggataaactccagtttgatgagtttttcctccttttggtgtgttgatatcaaggacgctgttagacataaggattaatatcaggtctgcttttcagacactgacgcagccaggagaagggggacatggcctccacagagttgcaggtggagcttgccttgcagcaaggaatcccaggccaaactaagcagggcaagcagcaccattgagtgtcccactgcgtgattggtttcatgtgttgaagaatctacagcctggaaaacaagtggcagaaatctgaatggcagcatggtcacagacactggctggctgaggacttcgagactgttgtggtactttctcaaggcttctgttcccttactcatcaattagagttgacaatggacactgatccctgtctctcctgtggattcactgctacctggagtcaggagaagggagcgggaagcagtcaaatcctttagggccttagttcttgtggaccaacatgttaacaagtgcagctgtcccaagctctttgttactgtggtaggcagagcaatgcccctcaaaagctgttcccatcccaggccatgaaaccagcgaccatgttacatatgtggcaatgaggatatgcccctgcattgaggtgcggctctggagatgtcctgtatttcacaggtgggcccaagatgatcacaaagttcctaaccagggaggcaggagggccaggtcatagaaagagaggtgggcgtggaagcagaggttggagtgatgtggctgtgagctggagaatgtggacagcttctagaagctgagatggtgaggaacagtctccccaggagcccccagaaaggagcacagccctgcagacaatgtgactttagccagacagacccatttgggatttctcgcctccagaaatgtagcacaaacatgtgtggttttaagccagtttgtggtattcagccacagcagcaatgagaaacagacataacttccgtgtgattccttgacaggccacgtggctcaggactcctgactccttcctggctttgcttgcttgactgcaagacacagtagggctagacacctgctgcggtctgagtgtggcccccaaaagcatgtgttggaaacttggtccccagtgcaacagcattaagaggtgggaccttttattttttaaaataaaaaggttccatgaggaagagctgaagtaggtggaatctttaagaagacgtgattaggccattaaaactctaccctcgtgaatggatcaatgcccttatctcgggagtgggttagttatcatggtagtgagtacctctctctctctcgctctctctctctctctctcttctctccctccccctctctttgaccttccaccacgggatgatgcagcaagaaagccttcccttaccagatgtcagcatcttaatactggacctacaggtctcaagaactgtgagacataaatttctttataaattaccccatcagtgtggtactctgttgtagtaatacaaaatggactagacaacacataatgttttataaataaattgtatttgtgggatgcttttgtctttctaatctctccaacaaaagacaacttttgcaggcccacttctgtttgcaggccctctgaaaagccatctcaaaatatgccaaagtatcctttttctttttttccagagtccttttttccaatgcaccaaagtatattttgagataaaatatctttggttttctccgctccccactttgaaacttcaaatgtttcacatataaaaaggcaagttgatccctttggagagatttaggttagagtttgttaaataagagacaggcaaagaagagaaatgacaaatttgaatgagcagaaaagaacaaatttaaatattttgtctcagatcttgggacatttctatggaaacagaagaaaaacaaaggttaatgtctggaatagtgtatggactagtttttccagagtcgctgaagcatcttcaaattgtagtggtaatctgacagatttttctgggtattagttggaatcaggtgttccagcaaactttctgagtagtctatacatcaacaggtacaaaggctgtttacatgtaaagttgctacagtgatttctcctaaagtttatatcaagttttctagcatcaatttgcagggctttaagaaaagcacagtttttttatttctagtgattccaagtcagaaaaatgtgagaaaatgtgagaacattagcttggagacttgtagccagaaaagaattcagaattcagtcccagttgtagacaaataataaaaactgaaaaacaatggacagggctagagtagaatagtgggtatactatagttttcttctgaaacataacttttctctccccagttccccatttctaacaaagacaaatcacaataggaccaatttatttgcaaaataagttttcattttgttataattggcctgattgtttgaataaagtacagaaaaggtggtgattggccattcttttaagttggccttgctggaactttttcataaggaatttcagattagacttttaaaatcctctaaagtctaggaaaccaagccaagtgtttgccatcagactgtgcctgtaatgcctgtagaaattcggtgaattcctctcctcttgaggtcccaatatatcttgaggttcttgggcccttcagaaagtgacattctatacttactccaaggtacagaaccttgtaagggaactgtgtagacaagatacctggccagtctttctgcaaggatttttattagatctataaaatcaactttagttctgctgaataggctcatcatatctgaaaatatgccattcttgtcaaaaccttggtaaaataaccagtgtctcaattttgtcctgttatttaaaaaaaaaaaccaattctcactgagcttatgcaaagaactatattgacataaattaaaaatacttacaaataatttccaaattctagagaaatctgatagagagataaatgtttcaattttgttcaattgttaaaagctatagatggcttaagagaaaaaagttttcttgattctggaaatcaaagcatagaaagaatccacaatgattcaaaccaaagagtcaaaaaaaagttttcagtcctctatcagttcagtcccatgtaattaactcttgttctgcttgatattgggttagcaatcttcaggaacccatcaccttttcttatcagagttctggaagtttttgcctattccaacggtatgatatccaaacttaccataaatctgtatccaagagtacttgtcaaggactttttggtaaatttccttaaagaagaagcaagctttcgactatagtaaatcataaactgctttctgagaagagtcaaagtagaacaaaaattatctgtggatgacaaaagacttaaaataaccagggttagagaaacaattgacaaggaaatttggttatttatgtgacattcagcaatttaatataataatcataattattactgataacacatatgaagacatatcagaattttagtaaccccattccatttaggaacacatattaataacacatttttataactacaactcaaagacatttaaatacaatttttttatgtggccagtctttccatatgatttttgcataccaaataagactaatatgtccctcttggacttccaggagttcttcatgaaaatacttacttttataatttgaaattagatttttggaagttttccaaatatcaacagtttaaaacacttgataaaaaaaacaggatgaatcacaagcaactataaagtaatggtcattcattagtgatgattaccccaagtgataaagattttaaaaaccaaaaacttttactccttgatagaaaggagactctgtttcccaaataatcaaaagacctaatgaagacagcatgaagcaaacaaaatccatctctcccctcttttttgtgcagtttacttacaaggaaaacaaaaatcatttgctatctcttattaatactacatgaaaatagtgtttaaaagagaaaaccaaattctacctttgcaacagtgtattaatgctaaagctaattttaataaaatcttataaacagatcccttcaatctcagttttgatcacataaaataagattttcataaaccttttataacttcttgcattttttctatttttttccccagctgtccattcagttgtatgactttaaaacacctaacagagagaataaaaatctacctaattagacccaggcaaaaaatgtctaaattaaattctgaagatgtttctgttttatttacttttctttttatttatttatttatttttagagacagggcctcattttgttacccaggcttgagtacagtggtgcaatcatagctcactgcagcctccaactcctgggttgtagctgagatgacaggcatgcaccaccacaaccagttaatttttttttttttttgaggcggagtttcactctgtcacccaggctggagtgcaatggcatgatctcagctcaccgcaacctccacctcccaggttaaaatgattctcctgcctcagcctccctagtagctgggattacatgcatgtgccaccatgcccggctaattttgtatttttagtagagatggggtttctccatgttggtcaggctggtctcgaactcctgacctcaggtgatctgcccacctcggcctcccaaagtgctgggattacaggcatgagccaccgtgccaggcctacaaccagctaatttttaaaatttgtttttagagattgaggtcttgctattttgcccaggctggtctcaaactcctgggctcatgtgatcctcctgcctcagccacctaaagtgctgggattacagatgtaagccaccatgtcttgcccttctattttactgtagcaataacttaaaaactatctttatgactccgcatgtagtgcatgcctttaatctcagcactttgggaggctgaggcaggtggatcgcttgaggccggagttcaacacaggcctggccaacatggagaaaccctgtatctactaaaaataaaataaaataaaataaaatgccaggagtggtggcacatacctgtaatcccagctacttgggaggatgaggtatgagaactgcttgatcctcgaaggtgaagattgcagtgagctgagattgcaccactgcattccagcataagtgacagagtgagacagtctcaaaaaagaaaaaaagaagggaaatttcttttttttttggagacagagtctcactctgttgcccaggctggagtgcagtggcacgatcacagctcactgcagcctcgactacccaggctcaagaaatcctcctagctcagcctcctgagtggctgggactacaggcccatgccacaacacctggctaatttttgtagttttgtagagacaggatctcactttgttttgcagtgctggtctcgaactcctggggtcaagtgatcttcctgcctcagccgcccaaaatgctgggattacaggagattgtaccattggatctttttttttttttaaaaaaggtaccccctcaagtggctcaccaaaaccagtaaggcttaatcaagattatgacttaaccaaggacacatgaggcatctccagagaggtgcacagcagtcctcaccagatccagaaccacctcaaagagagctcaaagaagggaaagttttgctagccacaaatggggtatgacccacatctgccagccatatcttccagggtctcagcctctcagctgaccatctacacacaaaagcctaagagccccgtgtaatccctcaaacagaagatgccagaaaaccaacagctgtctatggaagaggaaaggatcaatgacaagtgggtaagccacaaagtcaaaagtcacacaaatatcaaaccaaaagcgactggcttcccaactgggacctgcacccaggccatggcagtgaatgtgtggaattttaacaacaagactgcaaggtggggccaggtgcagtggctcacgtctgtaatcacagcactttgggaggctaaagcaggcagatcgtgaggtcaagtgattgagaccatcctggccaatatggtgaaaccccgtctctagtaaaaatacaaaaattagctgggcgtggtggcacgtgcctataatcccagctactctggaggcagaggcaggagaatcatttgaacttgggagttggaggttgcagtgagccgagattgtgccattgcactgcagcctgggtgacaagagcgaaactgtgtctcaaaaaaaaaaaaattgactgcaaggtggagtggctggcactgcagattccacaagggacccagggcaggcatttggagcatatgaaggattttagctttgtttcaggtcagacttttgctctttaatctcatcaagaggatttctaaggcaagccatgacactatgatgtgtcttttaatttaatcttccaatgaatataaataaggcagttgtttagaataagaaatctttaaactattttttgtaatttagaggtcttttcaacttaaagaatccatcttttggccgctaatgactagaatttccaataatgttcttattctaacatcaattccatcccacagcctcttcatggaaagccccggatgtggttttctaggcttagagtaggttattaccatttaagaaagacttgtttcctgaagagggcatagaataggcagttccaaagattcctccagtaaaattcactcctggaaacaggctcagatagcaagagacttcttttttattttaactcacagtttttattgattgaagtaataaaataaaaattagcaccttagttcctatttcttgtctattgtttttctttctttttaaaatttaattttatttaatttagttgtaagttccaggatacatgtgcaggacatgcaggtttgttacataggtaaacatgtgccatggcggtttgctgcacctatcaacccaccacctaggtatcaagccccacatgcattagctatttatcctaatactctccctccccaccaccaacaggccccagtgtgtgttgttcccctccctgtgtccatgtgctctcattgttcagctctcacttataaatgagaacatgtggtgttttgctttctgttcctctgttagtttgctgaggataatggcttccagctccatccatgtccctgcaaagcaacagactcttgttgccacacatggttaggatggtgtttgtgtgcacagtgcctctggtgacccacacatttctggggacacccatcacagaccccttaattcatgacactggacagctctcctaggatggaactttcccaggactaaccaggcaacaagggccagaccacaaaaattccttatggatgggacttcttattaagacaaacattcccaacagctggacacattcagaacaaaaagtttgctgcctaaaaccttgtatctcaggttcccaggcatcttcaggctaaacacctgatgggacccaaaaatcacaccccagatggcggaaacaagagacagtgctcccacttgtcacaagtcaaacactccagggcataaaacaagatgagaggggtcctcatctggcttctattttgtttttgttgttttgagactcagtctctcactctgtcacccacgctggagtgcagtggtgtgatcttggctcactgcaacctctgcctcctgggttcaggtggttctcctgcctcagcctcctgagtagcagagattacaggtgcctgccaccatgcctgcctaatttttgtatttttagtaggggggggggggtttcaccatgtcagccaggctggtcttgaacccttgacctcaagtgatctgcccacctcagcctcccaaaggactgggagccaccgcacccggcttggcttctattttgaggacccacagcaaagtttgaatgcccatctgatcacagccacagactggctgctcttcaggtctggcctgaacaatgggctggcaggatcttcagcccccattctaccctacaaggccccttttcaggacagaacaacacaggaagaccaagacagacgagaataatcctcccggaaggaagggctctaaacaatatgagtattcacaccaaaaagtacaccagagtcgctgcacccaacactgttcacacagatcctttctcacactaatcaacatcttgcagaggaaaaacgactgatttttaccatctgctcacccagattccacagagagaccggccaggagcccggctggtaagaatttcttacccttctgccagctcgtcaggtcctgggtcccctgactgaagcttccagaaaagcaaaacagctttggtattctgttcaggacaccaaaactgtaggggccaacagaaaacctcccctttgcccttgaaagtttcactgaaaaatcaactcacaactcagattaattagagaaatggcatgcacatttattaatgtgcacatggagaaggaccagagcaatgatcccaaccccgcagtggtgtgcagaagcttatttaccgccttgagactacagaaggaacaggggctgggatgatggcaagacaggttagaggagagggaggaggaggcctggctcgcaaaggtggtctcagaatgcagacagaaccacacagacagcagtcctcagagagaatagatggtaaacatttctttctgatggctaaacatgtcagactctgagggactccttcctagatccagacaagggaaggcttcagaggaaacttgcctgtgtcagtgtggattctctacagatgcaaacgttcccctcaaaaggcagctttgcagggtggcctctgtttgaaggcccctctaaagagccatctcaaaatatgtccaagtatatagtggggtgaaatattttggtttccttcaactacatccttactacttaattcaatgcaatttcccttagccatgaactcttcaagtctttttttgcctgaaaaggttttgattgaattcataatcttgagtgatcaccatgtaagcagataaatattggttgacagttatatttcctcagtatattaaagaaacctggctcggtgcagtgactcatgcctgaaatcccagcgctttgggaggccaaagtggtgggtggatagcttgagctcaggagtttgagaccagcctgggcaacatggcgaagccccatctctccaaaattacaaaaattagccgggtgtggtggtgcatgcctgtagtcccagctactcgggaggctgagatgggaggatcccttgaacccaggaggcagaggttgcagtaagctgagattatgcctctgaactccagcctgagtgacagagtgaaactctgcctcaaaataaataaataaatctttccatggttgtgtgcatgttgagatatctgtcttgcctaaatttatttctctattttttcctatcttttattttgatgtaatttcagacattttaaaagtcacagcctggtgtggtggctcatgcctgtaatcccagcacttagggaggctgaggcaggtggattgcctgaggtcagtagtttgagaccagcctggccaacgtggtgaaactccacctctactaaaaatgcaaaaattagctaggcatggtgggcggcgcctacaatcccagctactcaggaggctgaggtaggagaattgcttgaactcaggagacggaggttgcagtgagctatgattgcaccactgcactccagcctgggtgacagagaataaaaaatgaagagttcatgtcctttgtagggacatggatgaaactggaaaccatcattctcagcaaactattgcaaggacaaaaaaccaaacaccgcatgttctcactcacagatatgaattgaacaatgagaacacatggacacaggaaggggaacatcacactccagggactgttgtggggtgggggaagggggcagggatagcattaggagatatacctaatgctaaatgatgagttaatgggtgcagcacaccaacatggcacatgtatacatatgtaacaaacctgcacattgtgcacatgtatcctaaaacttaaagtataaaaataataaaatgaaactaaaaaaaagagttgcaatagtagtgcgaaaaattccatttatgattccttcagattcctctcatattaacattcaattacatttgctaaatgctcttctcttggtgcagatgtagaatattatagctattttcctagaccctgtgagagtcagttgcagacatgatgctcctttacctacaagtattgagcgtgtgtttctgaaaccaagggcagctcttacattatcagagttcagtgatcaaaaacaggaaatcttcattgacacaatacaattctcagaccttcagatctccttcagattttgccaacggttccaatattgtttttataggggaagaagatcctgaaccatgccttcattcagttgtctcatctggaactgttctgcaacctctttgatttcttgatattgatgtatttccagatacaggctagtcacttaatagaacatccctccatttggttgcctgatacgtcctcacgttgagaatcaggttttgcactttcagcaggaacactacagaggggatgctgggctttttcagtgcaaccactaacaagaaacatgaagccagtttctcccctgctgtgagggtgaggtgggctttctccctggactgcaaccacctgggtgagtgtgttttataaaattatgctttctccactgtaaccttctcccatttccatttctgagtgcaaactatcttgtgggtggttacttttgagattctgggtctcttaaacactagttttggttgatttacttcagtatcacaatacttcagcatattatctactttcatttattcttggcactcattgtggttctggaatctaaagatcaatagttttcatcagttccagaaattccttagccattatccctttgaataggaccgttctctcattatctgcattttctcctcttgtaattattgtcaagtgtgttttgcatattctcatttcaattctccagtctcctgatgatctttcacagtttgcaaatctttattgctatatattctagacaattccacatatggatattcttataatttctatcatcatctgaggctaatctgttgtgttttaatttttaacttcactgatttcactattcacttccagaagtttcccttggtgtttcaaacaagcctgtcttctgtggtggcaatgtggtattttctagtgactgcagccattcttacctatctttaatccttttaaacctagttaaaagattgccttcttccttgttccctctgaatgttatcagcttcacattgctaaggtttttgaggtataattgacaaagtgaggtgtaattgctttattgaagtatagttgcgtaagattgtatacatttaaggtgatgtgatgatcacagtgtgatgttttgatctatgtatatattgtgaactcattaccacaaccaagctaattaacacatctgtcacctcacacagtaaccttgtgtgtgcctgatgagaaccttaagatatgctctcagcaaatgtcaagtattattaactatagtccccatgctgtatattagattctagaacttattcgtcttgtaactgggagtttgtgcttatttatttatttatttatttatttatttttgagatggagtctggctctgtcaccaggctggagtacagtagcatgatcttggctcactgcaacctccacctcccaggttcaaatgattctcccacctcagcctcccgagcagctgggattacaggtgcacaccatcatgcccggctactttttatatttttagtagagacgaggtttcaccatgttggccaggatggtcttgaactcctcaccttagattatctgccctttttggcctcccaaagtgctgggattatgggtgtgagccaccgcacccagccagaagtttgtactttttggtcaacatttccccatcccctccactcccagcccctggcaacccctgttcccctctctgtttctgtgagttcaatttttttagatttcacatctaaaaacaggagttaggggagattgtgcaatacagtcaacccttgaacaatgtgagagttgggggtgctgacacccccatacagttggaaacgtgtgtataacttttgactccccaaaaacttaactattagtagcttactgttgcctggaagtcttatgtgttaatgtaaaccacagattaatacattttttatgttatacatattatacactgtgttctcatggtaaagtaagctagaggaaagaaaatgttattaagaaaaccataaggaagagaaaatctgtttactattcattaagtggatcatcataaaggtcttcatcctcatcatctttaggttgaggaggctggggaggagggagaagaggggttcatcttgctgtctcaggggagacacaggcggaagaggtagaggaggtggaagagaagaggcaggagaagcaggcccccttgctgtaactttttttgaggaaaattcacgtataaatggacccacacagttcaaacctctgttgttcaaaggtcaactatatctgcctttcggtgtctggcttatttcactcaacataacttcctctgggttcatccacagtgtcacaaaaggcaggatttccttcttttttagggtgaatgatattctattatctcattatatgtacatcacattttctttttccactcatccatgtgcgtacactgaggaagttcaggaaattccttccccgcaaccagaatatgccagtttgatgtgttgattgcttcaaactgagggcagtggtggaggagcaaatgcagggagggttttctgtggacctccctcatctgttgaaagacagatcttccaaagggaactcagctggcatgaatccccttcctgggaacctcatcaacaagggaagatttgttcatgtcacagcagcacagacagactttgtcactgctgtccctttttcattcttcattcttccggggatacatttatctttcccccaaataatttactctccctttggttgcctttgtcccctctctttctcccctttgcagaaaagtacataagcttccagcctcactgggtgttgggtttcacttttctttcacgtgatgcctcccgtgcccacatgtaaatttgtaagccttattctcctgttaatctgcctgctgtccattcatctcacagactcaattatcgaaccctctgagggtagagggaaagcgtttcctccccacaacacctgggttgattcagtatttcagctattgtgaatatgctgcaatgagcacggggatgcagacaactcttcaacaccctgaatgcatttcctttggatatatacccagtaatggagttgctggatcacatggtggctctatttttagtttcttgaggaacatccatgctgattttccacagtggctgtactaacttacattcccaccaacagtgtacaagtgacactgtactgtggtctgttataccctccttttctggctttcacattttgtctgtggtgcactcctcaaatgagttccgtggcatgccttgttcctgttttcactggaacatactgcacgctatgaggattatttcttcgtggaggcctggtcatacttggttgatgagcagaaggaccatttgccttttagaagcagatgtttgacttcaagtttaaaatcttctgtaattactgatcaaattaacatctccacaatactagttaacacttttcttaaaacgtcttttgtttcctaatactttttctacatttttgcacaaagttatttcattttaattactcttaatttactttaattttggaagtgagctttcttttcaacaatccataaatggttttttattttctcttttttcttgttcatattttcccaacattgtcccttatatatttccgtatagttaaccagatttatttcttatcaatctaatttgttttatattttaatcaatttatcgtttaccattatgaatttcttttttttcttactttttcttttgaaacagagtcttgttctgtcacccgtgctggagtacattggtgccatcttagctcacttcaatctctgcttcccaggttcaaatgattctcctccctcagcctcctgagtagcttgcattataggtgcgcaccaccacaaccagctaatgtttgtatttttagtagagatggggtttcttcatgttggccaggctggtcttgactcctggcctcacatgatctgcccacattggcctcccaaactgctaggattacaggcatgagtcaccacacctggccattttatcattatgaatttttgttctactttttccttttactttttttttttttttacagattttagtcttgttccagtttttgtttacctaacttcttcagttaaagttggcttattaaaatgttaaatttcttaggaaatggtaatctttggaggttaaaaagatttaaatttcttattattctcacaatgcacctaaaactatacagctacacattttttctcttagaacagcttctgttgtattctgaatatcttcttatgttgtactttcaatcctagataccttcttctctaaacttggtggatcttctgaaagttggagcagaatgggctttatagtttaaaaggtccactgctgtccagggatgtgaattctttgaggagggagttactgcacaaggaggtcgggagctgacggagtctgatgacaaggccctgggatgtaggagagggcacaaggcacagcaaagccagcctcactgcatgtccctggagcctgtgccaggtctacttcctggctgccagcttttccacaaatgctgtgtgcacctcacactttcagatcaggccgaaagatttctgtaggtcatgccaggaaagggaggttaagcaggcagctgtctaaggggtttgggggaagcttgggggagtcacaggattttgttgaagagagagaggtggaggagatggggctgtgtgttggggaggaaggttcagactggagatctagaaatccattagatcctctggtgggtcagggacaagagttgggggtgttgggggtataagtgggtggagaaggaggatttatggtgggagtggatttcaacgtctgctctaggtcagcttttggctccttaattttgttaagggatgttttaagactaaccatagtacattctgtgttcctctatcagtgtgatcttcccatagatgccagcagaccagttgtttagaacgagtactctctaacatgttttaaacatggatccgtctctggccatagctgatttggatctgcactggtgcatatgttccagtagtgccttaatctgcctttccagggaaaggccaggaggtggctttccatcattaccagcatgcaaggggtgttcctgcagtaggtgcagaagaggcagcccgtgatccaaaaattcactctcagagatggatgaagaaagcaaagacttacattgccatgtgcaggtagggagagtgtttgtgcagaccacgcctccagtctcccatggaagctgagacaccttcagcctcaggtccactcactgtgacactgggcaggtgatgctggaataggagtctcccagcactaatcagggcaacaaggataagatgaagaaagcccttatgaattggcatcttacaacaaaactccgtgagcgcttgacacatacagacagagagagtgccacctgggtctcatgtgtcttgagtccccagtctggtcagactgctgcctggcacagagccacactctgtgcccctccgatggcagagaccagagaggcatcctccttggtcacacagccaagctctcaggacataaaacgaggtgagaggggtaccccatcccttttgtttttttgtttcagggacccacagcacagtttgcttaggcagacatgggtctgacaagcacaacaaacccaagtgctggggacccagcagactttgaaggacctgtgcctgtgttctctacccgacacttcctctccttatgacaaacggcagaaaaagacagagacaaaggaaaacaaagaccatctttgagatcaaaaggatcaaatagaaatctaaacactaaaagtccctttttacccaaagaactatttcacaatgttttatcctgtcaatcccaatttagagagagaaaaagacacaaatctcaccattctcacctagatcagccccacagcagagacctggaaggctagcagtaagaaccctgcctttgctggcttaggtcagaggtcccgggtcttagctgcagtatctccagaataagcaatttcccagtcagtgagggagggccccggactctgtgccacgttctgcagggacccagagatcacctccaaccccacttagctcttacatgggctcctcagctggatctagaaaccaaattgaaatcaagcatattaacaagagaaaagcatacaaattgtattagtattaaaggtacatggggatcttcccaagttagtgaagtctgaagtagccaaagcaagatgcttttgtactttttagacagaatgataaatttgagaagaaatgacaaggccaagcagaatctggctaggggcagtaaatttccaggggagcctctaggtgatatgcgggaatataaaatcaatggcaacaaggcttacttcatgaagtacatttacttgggtcagttgctgcccccaatccccagtctccagtgctaagggctctcttcttgcccttgtgtgggggtgccacccccagaggagtctttatggcttgctacatgcaggaagaggcaggtcagctcaccctttctaaaactacgatttctccaatatttttgacataaaattatcaatataccaatttggcatattttgggatggcattcactccttcaagggaaaggtgggatggggaggtgtggggtcaggtgaggatgtggtgaaagacaaggtggggtatggatggaaatgggctctaggggaagagggaacaggcatggaaggggtgaggagagagagggccatgagccatgggtctggaggcagagagggaggcactggtgcaggtgataaaacctcacatgaggggtggcacaggtcagggggaaggtggaggccactggtgaggagactgggggttggcattgacaaatccacagatcccaaaggtgatggggaacagcagcgtcttccccggctccccacacagcagcatgttggcctccagatatactccatcacccccctgggcagggctcacacttctgacacccagactctacaatactcctctgtccccacccagggcagatccctaccctagaagttctccctctcatgtctggtaaatgctgcacagagccctggaattccacagggcaagttaggaagagggacagctgaaatcaggaagtaatcaccttctccaaagagaagttcagtccagtaccatcttgtgcccctgggcaagctctccaggctgagggaacaggagcagtggttatgctgggcaaagttggaagcaagggacctctcaggaagtgctgtagaatgttccactggggacacctcgtaccctaccaggattagaccttgaaacctggagatcccaggcaattagtattcaaggtcaaagggccagtgacaggaataggaaggcccactgtgtcattcacaaagcacttccaaacccatcaccccaggtgaccctcacaacaaccccgtgagatctgcagggcaggggctcccacaaagaaggagtcaggaatgtcgggattttaacaccttctccaagtcaggaccaggaaatgctgtcccagcaccaacttatattccctaggcttcctcccacaccacagcttagggtgactgccacctcatgggcagagaccctagctttccaatccttacaaggggctgtgcaggggagaggatgaagccccctcctctgactgtctcctctaagagcctgttttctgatgaaagtcactctgggaactgtcagcctctgcaaatgggggcctggacctcgtggaaagaagatgtgaaggtcacacctggcagggaccagctctggagggcaaacctcaccttttaaaattcccaacttgcatgtcctcctgccactgcattgatgctgacttctaaaggagcagcggacgtgaaaaagttgactttcttctaggttaacttcatgaagattattaaagtgatgaaaatatttatcctattctctataaagctccagcgaatatggttttctgcacatgcttatcaaagaatcttttagccaggagccctctgctgaagaacagtgtacaatctcagctgggacgcacatgttgcttctggaaacagatgaacacagtctgatcagagtctttcatgggtcagcgttgctccaggccagcccagcacagtcaggagcctcggcccaggcacgcccaagaagggagggtggctagtgcccagatgctgggggactgctcttttcgggtgctcttaattctgttaagaagccaatccatggccccgatgtcgtggtgtttggggctttaccctggcatcctgaacacacccagatagctgggtgtgagcactggagagaagccccggtctccactccacctcctgccctgcccaagctgctcccctggactgatagtgttctagtctctcctgagcattctcattcctggggcccctggggtccaatagtcaatttaggagcccatctaaagagactatctcttttagggggctggctttagggttcccttaccgatgaattggtaaatatggatggcagtggatgtagttgcatgacagaaagcacatcccaaccccacacaaaataatgagaaatggaaccaaagtcccagggctctccaagcacagaagaagccaccaaatattctccatctccatcatctgaagtgagctgatgcctcggcagctgggtgcagataacatgcagctcagtgcagagctccaggcccgcatcacaggctgtggaagggttacagattactcttgtgctcagaaggagacaaaacaatcagctctcccactgatcccaccccagcaggcccagcacccctcccagcttccaggccccaccaccctgctgccactacctattttctgtctccaaatttactttactgtaagttccttttcactctgtccatgacccagacataagcagggattccctcagagaaacagacttggatcccagctttggaggtctgaagatctccaggaattttttctaattctcaggcattaaaacaaatttttttggaagtataacatacagatggaaagcacaaatatcttaagcctacaatgcaatggattctcacaaacagtacactatgagagttgaactcacaccagaaaatgggatcaccccaggacctggaagcctctctagggcccctttcaagacatcacctatgccccgccccccccaccaaactttcctgacttatgattttccaggaacaattttatagttttcctgtgttttcactcaactaacatttacagtaatcctctgagataaacactgcactatcccccgttgcagatgggaagctggaagcacagacactggttattgatcaggtgcccactgctaagggtggagccagggtcccacgtggaagctccctgcagagccacattcttgaaacattgaactgcgctgcgaaaagccctttggctgcctgggcacagtggctcacacctgtaatcccagcgctttgagaggccaaggtgggatggttgcttgagtccaagagcccaagaccatcctgagcaacataacaagaccctgtctgttaaaataataataataataataaaattaaattagtgggtgtggtggtgcatgcctgcagtcccagctactcaaaagctgagatgaaaggaaaaaaaaaaaagaaaaaatcccttggcaagcaggaacaatagctcagttcaatgcaattgggtgtgtagaagaatcaccaccaagctctgggaaggctaggcagagggttttgcacacactcagggagtcctgtcctctctactgtggttggaacctgagaggggctgtgaggctctgagcaggagagagacttgcccaaaggccaaagacagggaggagtagagtctaacatgagtacaagattgactaggaccatcgtttatctctttacacaggaacaggaggaacttgaggcaaggaagggctatataagatgcagtcccctccctgcaggggccagcttggtgctggatgcatggttggttttatagtgacttgaactctgggactgcggcaggtggggccagatccttgactgtgcaggaatagacctcttccctgaaccgacagatgctgtatgaggaggggaggagggctgggaagccagccaggctggggtgggtgggcagagagtgttggggtttctcacctgtcctaacaaccacaaccacctttctggccttagaaagaggcaacagggagtgtgcgttttgtagagttcttcagggctgggcagagcccctgaggagatttgttgggggtggaaggacagaattcagatgaaggagacttggaaaaatgagttttaagaagttttattgtgggttatgatttcgataatgattagaattgcgtttcagggtgggcatggtggctgatgcctgtaatcccaaaatttgaagaggcaaatgcaggaggatcacttgaggccaggagttcaagaccagcctggacaacatagcaagaccccttctctgcaaaaaaaaaaaaaaaaaaaaaaaaaattgaaaattagccgggcatggtgtgacacacacctatagtcccaactagttgagaggctgaggcaggaggatcacttaagctcaagagttcaaggctgcagtgagctatgatcaaccactgcactccaacctgtttccaaaaaaagacaagaattacatttcagtataatgaaatcataatttttaaaggtaaatactataacctttaattgagagagaaaaagagtttgacagcttcaaacttgatactggcataaaaataaacaaaatagcccaaaagtccttgtaaatattcatgtatatataggaactgataacagaacaaaggttgttttccaaagaaatgagggatggctcacaggttcattgagtattgttgaggaaataggctatccatctttgcaaatgctcagattattcctaccacacaatatacagaatctagttgctgtataaggaagaagagggtggctctgggcagacacctgtgtttcaatcccagttttgctctatgcacctctatggcctagagaaagttaccctacctctctaggtatatgctatccagatcttaagcgggtttaagaaaatagctaggctggtcatggtggctcacacctgtaatcccagcactttgagaggcagaggtgggagaattgcttgaggctaggaattcaagaccagtctgggcaacacagtgagtccctgtctctacaaaaataaaaaataaaaattagatggcatggtggtgcataactgtagtccaagcaactcgggagtctgagacaggaggattgcttgagcccgggagttcaaggccacagtgagctatgattgcaccactgcactccagcctgggcaacagagcaagaccctgtctcaaaggaaaaagagagaaagaaagaaaggtagctaaatcatagaatggttctgataaactgggctctagatgtgaagaccttagaacaatgcctggcatgttcagtaaatactatttccccatatccgtctattaatagcacgctaaacataggaggagaaggccacacaagcaagtgggttacaaacttctggttctgggtaggactcaggagcagagagagatagatgagggatgatggaggatagcagtggactcactaagattgacttcctggctcaaatcttggagaggaaaagggaaaatcccaaaggactttggccatgggagttttgctgctagtattccagggcatgtcctgtgattcatgctcgttaagacaaagaattttatagcagttgccatcccagaaaattcctattccagcttccctgggccacaggtgagacagaggctctctaaagtcaacccgcaggtttggcttcttccatttacctgtgccctttctttcaacaagaggcctccaaggctgccacgatggagaaaagaaatggggattacacaggagacagttctgtgagccaagccccaaagcggcagcctgagcttctgcccacatcataccgacaaggactcagtcctgtggctcctgctactggcagggaggtgaagtttccctgatctgcaagaggaacatgagtgggttaggtgagcaatagcactgactgcaccagcatgccttcaggtcagcagattatcatatttctgttgccactacacaccaataaaacagaaactcactctgtctccaaggtggccatgcaaaggactctctagtaattccatcctgctcaaagctcaggaccattggctcacacagagtcctctccaaagcagcaagatgtggccctgtgcagccaggagacagaataataacctaattcccattcagaacatgcagaacatggaccaaggagaaacacagaataatttgtgtagcctacggggctggcaatgggaagatagtaagaatgttttccttgattggacatcaagtctgctctctggaattaagtccattttcattttgttttctcctcttgtgcctggctctcctctccaaggaattcatcattgtctgttaccatcttggtcacttctgaagtgggtttgggggaaaaagtctctgtgggagctgcaagtttagcagcctacttccttgcaaagatggtaccaagacttgcctatgggtccaatggttttagatcctgctctgcatttagacaatgctcatagctgctttgcaagccaccccaaaccttggttaactcacatccctgtgtttccagtcagttccatgagccaattaccacaccccaaaggcctttctttcttggacataattctcaagactgagccttggtagattggacttctaaaatactctcttactacttggggtccagaagcagcaaggtttttccaccttacaaagtctgatgtttctggattctcttgatttctttttagttatacttacatactgggaaaattattgaactcatcttcctccaattacttgccaaatgcatttatcaatatagaacacacactactaacattgtttatcaaactcttcccttatagtcacaagttcagcagcaggtgcataatctgccatctaagtaactgcaagtgatgactttaccaaaggctttgttatcacttaagatggattcagctttcattagaattattcatcaaaataatataatacaaaaaccaaataaaatgtggctacaccataaattttggtaaatgattagcaaatataaaaattaaaaaattttggaacgcttctcttaatgagacagatggacttctgtcccagctttgccatgaatctgtgaatgaacagttacctgctagaatgtgacagagttcaacatcagtcatacacctattttttcacttgttcagtttgaagtcctgagaaaccttgcttacataaataagcagataggaatggaaagggtctttatgcaattatttgaactctttcaaagttatagaccaaaaagcacagttatatataataaaagttattgtaaatgacccatctgctgacaactggatttgttccaccttcagtttgttcaaatgaagaattgaaacttatgtgactcgtagtgggatttgatatccaggaattaaagacagtctcacctgaaatacctacttcagtattttaaattatccccttgttaatccctggagatatggatctatggtctatagtaagatgcaagattgttgaaagggaacctcttgtgaagtgggagaagggctattctaaatagggactctttgatctcatgctagatcttaggaagatcatattttggaaacagcccaggtagaagttaaagatctgaaaattaatttctttaaaaccatccatgggaaagttctgagttaggaattccaaaggcctgccttctaccaaaacagtgaaaccactggcaaaaaactgtcaaaatcactctttatagaactctggaaaagcttgcagcaagcagtagagcacatattcaagaaaaactgctgacaccaataagaaaagcttgctccagggtgctttagcttatcctggttccatctcctgcttcccttgaaaactcacagctgttgttcccagtgtggtactgaacagatcagaaatgaagatattctcagagagttggaactgctcattttgatctgtcagattgctccccagaagactagctccaaaggattgccattctcttgtccaccttggaactcaccccaaactgaagcaccacctcagagcaattgttgacaacatatatggcaaatgttccaggcccaacttccaaagggaatggacagttgctggggaaaacaacaggttaaccaaaacttactgggagaaaagtctggaaataagatgttttaggcaacaagggctttggaaaattgttacaaattcctgggaatcttgaaggccgcacacatgcccagggctctgtgcaccctcagagaagagctcagacagctctaagctcacccttggctgatcatgaggttcaacacaggcaggaagtgaaggttaagaccaggttggaaaccacctggctgagcattgaaggaatgacctcaaaatgcaaacacttcctctgcaaagattagatttttattttattttattttatttctttagacagagtcttgctctgtcacccaggctggagtacagtaacatgattatagctcactgcagcctcaaactcttgggctcaagtgattctcccacctcagcagctgggaatacaggtgtgtgccaccacactcagctaattttgaattttttgtagagacggggtttcacgatattgcccaggctggtcgtgaactcctggcctcaagtgattcacccatctcagcctcccaaagtgctggcattacagacaacagccaccgcacctggccaagattagattttttttttttttgagacggagtctcgctctgtcgcccaggctggagtgctgtggcacgctctcggctcactgcaacctctgcctcccaagttcaagcaactctcgggcctcagcctcccaagtagctggaactacaggcacccaccaccatacccagctaattttttgtattttagtaaagacggggtttcaccatgttgcccagggtggtcgtgaattcctaagctcagccattccacccaccttggcctcccaaagtgctaggattacaagcatgagccaccattcctggcctaaaatcagctcttttaagtatgtccaaagagctacaagaaaccatgttctaaagaactatggtgaggacgaaaacagtatctcaccaaatagagaatattaacaaagagatgggaattataaaaagaaattcagaagttaaaaagcacaataactgcaatcaaaattcaatggaaggctcaccagtgcatttgatcaggcagaagaaaagaactgacaccatggtttaggtcacagcatcccagatgctgcaactagatttttcctttcttaggaaccttggggtccaagggttgtagtcccactggtgttcaacaacacacggatcaatgtgtgtccatgcagtacatttaattccgaacccccatttgggggtactgtcaggcttatagatgccttcatatacatacattatgagatgctaggatattcctgctgctcattactaggacagagctccagctgccatttcaacaaaaaatcccaaaaagtcaactaaattcaacgccttcatctgcactcaatgagcctgtctgcccagtggggattgtggacagagcagaagcattatgacacgttacgtgttggggtttttagtgctaagtttgtgtgatgagaattgctgaaccctctgatgtggggtgagtcattaaattgtctcccctgccactgaatagattccaacatagcctggccacacgtccaagggtgtgggggacagagggggagccgaagcactgatgctccctgatcctttgatcagtcaagatgactaaggtgggtgcacacagaaggcgggggcaggaaagtgctggggtggatgttggagaaccgacactagtggagctaacccaaaatcactaaatcagggatttcagatggcgtctactgttagggagatgagaatcctcatgtgagatgagtcaggttctcctgggaattgccatggggcagggggttgggggggagttaaatggcactcctgaacactagggctaattaataataaagccctatatttccattttactgccaatcacatggagacataaacatcttcctgatgggagccatagccaaagcctttccacttgcaagagctccgacttcccttcagtgcatgcgggttgaccagggagactacaagagggggcaggggtgagattcgtggcaggtgagcctgggagcagagcagagagaagcactgttgtaccatggcttctttttccaattttgctttttttttaaattatactttaagttctagggtatatgtgcacaacgtgcaggtttcttacatatgtatacatatgccatggtggtgtgctgcacccattaactcgtcatttacattaggtatatctcctaatgctatccctctcccttccccccaccccacgacaggccccagtgtgtgatgttcctcttcctgtgtccaagtgttctcattgttcaattccaacctatgagtgagaacatgtggtgtttggttttttgtccttctgacagtttgctgagaatgatggtttccagcttcatccatgtccctacaaaggacatgaactcatccttttttatggctgcatagtattccgtggtgtatatgtgccacattttcttaatccagtctatcgttgttggacatttgggttggttccaagtctttgctgttgtgaatagtgccgcaatggacataagtgtgcatgtgtctttatagcagcgtgatttataatcctttgggtatatatccagtaatgggatggctgggttaaatggtatttctagttctagatccttgaggaattgccacacagtcttccacaatggttgaactagtttacagtcccaccaacagtgtaaaagtgttcctatttctccacatcctctccagcacctgttgtttcctgagtttttaatgatcgccattctaactggtgtgaggtggtatctcattgtggttttgatttgcatttctctgatggccagtgatgatgagcatttattcatgtgtctgttggctgcataaatgtcttcttttgagaagtgtctgttcatatccttcacccactttttgatggggttgtttttttcttgtaaacttgttggagttcattgtagattctagatattagccctttgtcagatgagtagattgcagaaatgttctcccattctgtaggttgcctattcactctgatgatagtttcttttgctgtgcagaagctcttcagtttaattagctcccatttgtcaattttggcttttgttgcctttgcttttggtgttttagacatgaagtcctttcccatgcctatgtcctcaatggggggcattgcctaggttttcctctaggatttttatcgttttaggtctaacatttaagtctttaatccatcctgaattaatttttgtctaaggtgtaaggaagggctccagtttcagctttctacatatgactagccagttttcccagcaccatttattaaatagggaatcctttccccatttcttgtttttgtcaggtttgtcaaagatcagatggttgtagatgtgtggtattatttctgagggctctgttctgttccattggtctatatctctgttttggtaccagtaccatgctgttttggctactgtagccttgtagtatggtttgaagtcaggtagcgtgctgcctccagcttttttcttttggcttaggattgtcttggcaatgcaggctcttttttggttccatatgaactttaaagtagttttttccaattctgtgaagaaagtcattggtagcttgatggggatggcatcgaatctataaattaccttgggctgtatggccattttcacgacattgattcttcctatccttgagcatggaatgttcctccatttgtttgtgtcctcttttatttcattgagcagtggtttgtagttttccttgaagaggtccttcacatcccttgtaagttggattcctaggtattttattctctttgaagcaattgtgaatgggagttcactcatgatttggctctctgtttgtctgttattggtgtataagaatgcttgtgatttttgcgcattgattttgtatcctgagactttgctgaagttgcttatcagcttaaggagattttgtgctgagacaatggggttttctaaatatacaatcatctcatctgcaaacgggacaatttgacttcctcttttcctaactgaataccctttatttctttctcctgcctgattaccctggccagaaattccaacactatgttgaataggagtggtgagagagggcatccctgtcttgtgccagttttcaaagggaatgcttccagtttttgcccattcagtatgatattggctgtgggtttgtcataaacagctcttatgattttgagatatgtcccatcaatacctaatttattgagagtttttagcatgaatggttgttgaattttgtccaaggtcttttctgcatctgttgagataatcatgtggtttttgtctttggttctgtttatatgctagattacatttattgatttgcctgtgttgaaccagccttgcatcccagggatgaagcccacttgatcatgatggataagctttttgatgtgctgctggattcggtttgcagtattttattgaggatttttgcatcaatgttcatcagggatattggtctaaaattctcttttgtggttgtctctctgccaggctttgttatcaggatgatgccggcctcataaaatgagttagggaagattccctctttttctattgattggaatagtttcagaagaaatggtaccagctcctccttgtacctatggtagaattcggctgtgaatctgtctgttcccagatgtttttttggttagtaggctattaattattgcctcaatttcagagcctcttattggtgtattcagggattcaacttcttcctggttaatcttgggagagtatatgtgtccaggatttcatccatttcttccagattttctagtttatttgcatagaggtgtttatagtattctctgatggtagtttgtatttctgtgggattggtggtgatatcacctttatcattttttattgcatctatttgatacttctgtcttttcttctttatcagtcttgctagtggtctattaattttgttgatcttttcaaaaagccagctcctggattcattgattttttgaagggttttttgtgtctctagctccttcagttctgctctgctcttagttatttcttgccttctgctagcttttgaatgtgtttgctcttgcttctctagttacttcaactttgatgttagggtgtcaattttagatcttttctcctttctcttgtgggcatttagtgctacaaatttccctctacacactgctttgaatgtgtcccagagattctggtatgttgtgtctttgttctcattggtttcaaagaacatctttattcctgccttcactttgttatgtacccagtagtcaatcagcagcaggttgttcaatttccatgtagttgagcggttttgagtgagtttcttaatcctgagttctagtttgattgcactgtggtctgagagacagtttttataatttctgttcttttacatttgctgaggagtgctttacttccaactatgtggtcaattttggagtaagtgcgatgtggtgctgagaagaatgtacattctgttgatttggggtggagagttctgtagatgtctgttaggtctgcttggtgcagagctgagttcaattcctggacatgcttgttaaccttctgtctcattgatctgtctagtgttgagagtggggtgttaaagtctcccattgttactgtgtgggagtctaagtctctttgtaggtctctaaggacttgctttatgaatctgggtgctcctgtattgggtgcatatatatttagggtggttagctctttttgttgaattaattcctttaccgttatgtaatggccttgtctcttttgatatttgttggtttaaagtatgttttatcagagactaggattgcaacccccgcctttttctgttttccatttgcttggtagatcttcctccatccctttattttgagcctatgtgtgtctctgcacgtgagatgggtctcctgaatacagcacactgatgggtcttgactctttatccaatttgtcagtttgcatcttttaattggagcatttagcccatttacatttaaggttaatattgttatgtgtgaatttcatcctgtcattatgatgttagctggttattttgctcattagttgatgcagtttctttctagcatcgaaggcctttacaattcagcatgtttttgcagtggctggtactggttgttcctttccatgtttagtgcttcctttaggagctcttgtaaggcaggcctggtgtcacaaaatctctcagcatttgcttgtctttaaaggattttatttctccttcacttgtgaagcttagtttggctggatatgaaattctgggttgaaaattcttttctttaagaatgttgaatattggcccccactctcttcaggcttgtagagtttctgctgagagatccactgttagtctgatgggcttccctttgtggataacccaacctttctctctggctgcccttaacattttttcctttaattcaactttggtgaatgtgacaactatgtgtcttggagttactcttcttgaggagtttctttgtggcattctctgtatttcctgaattggaatgttggcctgccttgctagattagggcagttctcctggataatatcctgcagagtgtttttcaacttggttccattctccccatcactttcaggtacaccaatccaatgtagatttggtcttttcatgtagtcccatatttcttggaggttttgttcatttctttttattcttttttctctaaacttctcttctcacttcattttattcatttgatcttcaatcactgatagatttcttccagttgatctgaagcttgtgcattcatcacgtagttcttgtgccatggttttcagttccatcaggtcatttaagaccttctttacactggttattttagttagccattcatctaatcttttttcaaggtttttagcttctttgcgatgggttcgaacttcctcctttagctcggagaagtttgatcgtctgaagccttcttctctcaactcatcaaagtcattctccatccagctttgttccactgctggcgaggagctgcattcctttgtagggggagaggcactctgatttttagaattttcagcttttctgctctgtttttttccccatctttgtggttttatctacctttggtctttgatgacggtgatgtacagatggagttttggtgtggatgtcctttctctttgttagttttccttctaacagtcaggatcctcagctgcaggtctgttggagtttgctggaggtccactccagatggtatttgcctgggtatcagcagcagaggctgcaaaagagcgaatattgctgaacagcaaatgttgctgcctgatttttcctccggaagcttcttctcagaggggtacatggctgggagaggcgtcagtctgccgctactgtgggatacctcccagttaggctactctggggtcagggacccacttgaggaggctgtctgtccattctcagatctcaaactctgtgctgggagaaccactagtctcttcaaagctgtcaggcagggacatttaagtctgcagaggtttctgctgccttttgtttggctatgccctgcccccagaggtggagtctacagaggcaggcaggcctacttgagctgcggtgggctccactcagtttgagcttcctggtcactttaccaactcaagcctcagcaacggtgggtgcccctcccccagccttgctgccacctcgcagttcaatctcagactgttgtgctagcaatgagtgaggctctgtgggcatgggaccctccgagccaggggcaggatataatcttctggtgtaccgtttgctaagaccattggaaaagcgcagtattagagtgagagtgacctgattttccagtgtcatctgtcatggcttcccttggctaggaaagggaattcctgaccctttgcacttcctgggtgaggcgatgcctcaccctgcttcagctcatgctcggtgggctacaccaactatcctgcatccactgtccaacaagccctagtaccagtacctcagttggaaatgcagaaatcacccatcttctgcatcactcatgctgggagctgtagactggagctgttcccattcagccatcttggaatcgccattccctttggcgtctttgtctctgctctgctttgcctgtatcattatggactatccctaggggagaatctggatgaacacaggtggtggctgagttctccacagcccacctgcagtgagtgaggacctgcctcttctcctgaatggtacctctttaaccatcagttgggcacatttgtctctcagcctggatcttctaaatgtgtccaagaagtcttagtgccagttgtttctccaggactgtgggaggctgtggcagctcaggggctgattgggagatcatctcttttccaacctttccctctatgagttccaacttccatgaagcctgtgtcttctcagaagagatgggagaggtttctttttctcatccagcccacagcctcagcaagggatcgcccatatcagtggctatcatgggcccaggcatgaggtgaccacaggagttggggctgcatgagacactcaccttgcagttggtggcaggtgtgtcctcaggggagtcctgtcagccagcactccaggtgcgggatgcagggcagggcagccttcaaggatagcagaagagtgggttgggttggagagggcaaggaggaatcacttatgtatgctccctagttttaaacctactaaaatgtttataggatagacctgaacagtctgatcatttcaaaaggtaaataaaactctccttacaatccttgtcctcaaagtccttagccccgcacacacaggattgtgcgcaatgagggaagctgcacctgccagcccaggcctgtggagttctgggcgttgcttcatcactttgtgtcactccataagggactgttcacgtgtatttgttcagcttcgctctccagaaggcccttcaactattagtccattgtatctctcaactctcccaacagattgttgaagcatttcacagaggaggaacccgaggctcctatgaaggaatagttcacccagagtcatggttgataggccacaggtcatggggatggcttgccttgggatgagtgtgtagattgactttaaatttctaaggaggggagtttagatatgtattcccaaaacttaccatcgccatctggaagtttgaattaccatcttactgggaactgtccaggtgacctcacactagagctcatgtgatatccgtttatgatgaggtggttgtgtgctcagggtgcacacatatctctgagtgggtgtgaggcacatgccaggtgggcacagagacatccacctggaatcccagaatggtttgaacccctctacatatagacctttccttggtgctgggaagtcaattgtcctctccgacccttgagagggaaggtcctgggtggcccataatgtttcagatgttttaggtatcagtaacctttaaggacattactgtggatgccacccaggaacagtgggccctgtgaggcccagcccagaggtgccatgctggagaacaatggtcccctgggcctagtgggtgagtctgtcagcactgattgatttattcatttatctttaataatttcaacttttcttttcgattcagggggtccttgtgcaggtttgttacatgggcatatcatgtgatgctgaggtttggggtacgattgatattgtcactaaagcaacgagtgcacatggtacacaacggttagtttttcaacccttccccccttcttctcttccttccccctcttgaattccccagtgtctattgttcctatctttatgcccatgtgtactcaacatttacctcccacttgtaagtgagaacatgcagtatttggttttctgttcctgagttaattcacttaggataatggcctccagctgcatccatgttgctgcaaagcacgtgatctcgttctttttatgactgtatggtattccatggtgtatatgtacacattttccgtagccagttcaccattgaagggcagctaggttggttccctgtctttgttatcgtgaataacgatgatttattttttgaacatgtgtccacgacagcttggccacacccctcctctcagccctcagtcacactggttctttcacagcacaaaggactacctgaaggaagcttgttaatgtctctacatctggcttgtcacccaccagagcatcatcttcccattgcaatgtcatgcctttctggctgctagatctccaatacccagaacactgtggctatctttaaaaaataaatcactagattaaatttttaccaagcaacaactctgttctgagcacgaagctagcgtttgagagcatagcaggaaaaataactggcccttgcctttttcttgcaaaactgagattgtgctggtggagctttcattgattggattattatgaaaataaaggtcagccagctgtggaatcttccttcactctgctctgagcctggccatgcaaaccagcaacatgagctcccactgcctggagatccgaggcaggactccctcctgtcctgtgagggacactggtgtcctcagggtcagggtgctcttccctggctgcccttggaagcccacctcattcttcctcaggagcctgccctgaacctgaggcccatgcttggttctggcataggattcaaatccctgcagcttcactgcagagcaggagctctgccagagagaatttcccaggtggagcaaggacagggctgtggagggcagggaaggtcctccctggggcctgagtccaggtgagccgcagacaggtgtgctcctgggaggacctagccagggagggagcagggtcttagtgagcgcggtgcggagttccaggaatggtgttttcaggtagtatgggggctgctggttgaccggttcctttgaggtcatattcctcatgcgtatcagtctcccttcctatatgttcctgtcctcctgggcgtcggagtttcccgttgcagcctctgccctgacccttgcccttggaccgtttccctcccctttcatccctgaaatcccagatctattctatttttcctcttatatcaaccctgaaaatgttgtctgtccgtttcctaagtcgtgtttccactcgctggtgtacggattgtcaggttctaccccatgcagctgggtgggcctctccggctccttcctgctcctgtaggtttcatcccccacctcccccaacagcggcttttagctgcctggggccgcccgcctgaccctaggacgagtgcggaatgaccccctctccacgcggagccctgagcgggaggcggcaggggcccaggcagcaggaactgggaacaagccgcccggcaggaagtttcgggtggctggaatttaggaagaagctagcctgagctcaaaacctcctgctaaacaaaccttaaggcgcgcatccggctctgtttcccacctgcaggttccgcattccttagcccagcaggcggggaggcgggagcggggtcagaattggtggaaggctggggttgcggggtgcagagagtgctgagccatgaagacttggggcagcgaggccgagtgatggcagagcctggggaggtgtccaggctgcgggggagcagggactttggagcaatgaccctggggggacactgagcacagggccagggtggcgtccaggggtctcgggtaggcctggactaaagaggcctgggaagagagacgtggggaggtcaaagggccctggtgagtctggatgaggagcagaggattgagtccccccagaactgagtccaatgtttttggggggagggacaaggaaacagtgagggggtgggggccatgtgccactgttcgagggacaaacccagctcagaggaaataaggcacgggggtgaggtgacaagggacatgggggtgacagggccatgagatgaggggtgtcgaggtcgggccaggaaaagatcaactaaacagccgggggaagtggggacccagggaagcaagacatggaggcatgagggagaaaaagggaggagggggagctcagcaaatcagtcactgccaggcgcctctaggagtctgattttgtggcaccttagtcatgttttcagagaagaggttcatagtctagaggatcccatggccacatggccaacacagggaggaagtggggtgaagagctggggtgcccatctgtggccccgcttccttgtgaggttcccacaggccctgtgggcacacagcccagctctgccctgaactcagggcctgcctgggtcctgtctcttccctcctgtactttctgtctcagctgagctgttcttgcctgcaccttagcacctcaggctgagtgggagggagaatcctaaactggccctcaagattctgccccctggggaacagccctgtgtatagaatccctttcaccagggtggcctggatctctgaatactttgggatctcactccccaagttacatgactttacattgcagttagggggttttgaagatgtaattacaacccctaatcagtctactgtaagttcatcaaaaaggagattttcctggagaggcctggtctaatcaggtgatccctttcaaagaagggctggaggctgggcatggtggctcacgcctgtaatcctagcactttgagaggccaaagcaggaggttcacttgagcccaggatcacttgaccccatctctacaaaaaatacaaaaattagacgggagtggtggttgtatgcctatagtcccagctacatgggaggctgacgtgggagaatcacctgagctcagggaggttgaggctgcagtgagctgtgattgcaccactgcactccagcgtgggcaacagagcaagaccctgtctcaaaaaaaataacaggaagaagaataaaaaagtgggctggaggtcagaagcagaagggatcagcgtgatgcaaggcagacagtctcctgcaggccctgaagaggccacctcctgtgctgtgctgctgtgccaccgctatgctgctctgccaccttgtggagggcctccaggaaggtttctgaagctgctgcgtgtgtggcaattggttacgtagcagcagaaaacaaatgcagctttctactcctccctctcctaccccacccctggatctaaccagttcctgatattctctaaccaaggatcaccctgcacactcctggacagccctggtgtgaaccctcactcaccctgggtggctgaagatggtttgggataataatgataatagtggctcctgatatctgttgggcactaactactgtgcaagtattttatgcccatgaagccatcccattttcacaacaactgcataaggaggcatatctagaagaggatctagcagccttccagttcaacttcatttagacatcaggatcccaggcccagaggcacaggtcatggtttccaagccccatagggcgctgttttcaactgttaggataatccagaacacctggagggcgctcctatgtgctatgagcaaagcaaaaacatccttcattcaacagactctccccaggctgagcctgcagaccccctcttgtgatagggtcagaattcagtttttaaagagcttagtgtgtagatactattgatgatctttgggagctgaagtgttcttgaactccaggcatagtaacatgttttaggttcatttatttgaagcattatgaaaggaaaatatatgttacacctcaaaaggagtttagattctctgtagttataactactgtatagtcacatgactattttctaaattttaagctaaatattcagtgtgataagatactcatttttgtacatgttatatccacttaactattaaagctggtcatttattacctcacatgcagtgttaagataatgagtaaattgttcataaattttcactactattattgggaagcatcatggcatgtaataaatcatcttttttatacatagaatgaaatcaaggctagggaaggtacatactactccattcgtgctgtgtggctaagaatggatctcatcgattgtgtataatggcaagatgagtactaaaaatatttgtaggatcaatacttgaatgttcataagcaagatgtcacaaatatcccaccattcctacaaattaaaataattttagtataatttttagacagcacatttataaacatgtgccaaatagaacatagccacctagcacagtgactggattggatgtagtacgtctctggattcctcctatgtgtttactggagatgtttgggaagtcacctagtcctttgattgttcatattctttatccatgtattagaatttcatagtaactgcttagctgatgtgtttcatgtaagttacagaattgtctattaaacatgctgtgctcattacctattataggatattgatttttgtctgtatatttgcccttctttaaaacattctagtacttttactttttagaacatgcaggagaatacgtagcaggaggagagcaaagatgacaccaacttttttcatttcttagcccttttgatctatgttatggatgaagatatagatgaaaattaaggctgagatatctgatatcctgatatctgttgggcacttttaatctgttgagaattttaattgttagatattttacttctgattatgtgaacatatacaatttaatgattaaaatattataaatttcatgcttaataataaatgtctttcatatatgactccatcaaatctttaaactttgcatatttatactgtgaaaaaaaatgaattaactaagcctccggctttctaaaatggaagcaggagaagcactcaaatctgctaaaggtcaagccacagaatgttccagtagacttggataaacaactgaagccaatgtccaccagccttcagcatctttcagctgggagtggcctcgttaactgaccaatcaaaacgagtttacaacttcggatttctgcccaacaaatcaactgcctttaaaaataacttttgtggaaatccttgattcaaaaatgtttcctgcacttgccttacaagacactcttcagggccgccctgactcactgtacctgagttgcaattctttgtttctcaaataaatgctatttcctttgacctccatgcccatcttttttagtgaacagcacagtatcgtaactgttattggtatccattattaagactgttggacctttcattgcttcatagaattatctttatcttgggcaagaaagtgaaaattatccatagtttctttaaaatagtaatattttaagccactcaaaataagaaaaagttaaagttcacaataaaaagatcctgatttacctgaataagacttgaaaagtgaagaacaattccttctacctgaaaagggtgttgacccagaatccaccttggacgaccctctagagctggcaagtcagcgtcatccccagtgcacctgtgactgacaacacatctcacccagctgccatagggatgtcaaagacacaggatacagtgctggaaagggaaaaagcatcagtgcaaaagtagatttcaggatttggagcacggaggcaagtgccctctcctggcatccctgcatggggccatagtgaggaggctctgcagtcttccaggaggactggaccatggataggaaatacccaagacatggattctctagggacatgggcgattccaaaagcaccgaggagcgtgcccctagagaagcagtccactgggtccgtagtaaaatctcatggcataaccaatgtggagaccagagactaaaaatctgtaacgtccttggtgtccatggacctcaaagccaaacacaacagccccacgagtatctgtcatccaggcacggagagctaggggcgagcttctaagggtaaaggaggcttcttccctgtccagatgtgtggacgcttgggtttacagataatggaggtgtctatgtatgttgtcatgaaaatataaggcaagtggcaccaaatatgatttagtggtcccagaaattcggtgctgtgtgctttctgcacgacattaattttaattatatggacacagaaggagaaaatttaaaacttaaatgtcttatcattgctagaaaaataaaagttttttccctacgagttagaaatcttgatctctgcgtttttctatggatcgattctcaaagtttgtgcaaatacagttggtgtttctttctaagtgtctttggttatgaactaaggatgtaaccaactcctgcttattaggtaaagggatgaggcaagagagatccagcaacagggtgtgtttttttttcaatctttggcaacatttttctgtgatgtccaaagtagtgaactccctgactagggtttcagacatggagtgttctaatccaccaaacaccaaagggctgggaagaagtgatttggacatggataaccagtgtcacctacaacatggaacagagggtcatcaaagtggtctgagtcactttaatatgtggctggagagatgcaagaacaacagaaagagccctcaggaggcatccccacccaagggcagtgaagctcagtgcagctgcggggtgtggggtcatagggtgaccaggtgacagggctgatggggaggagaaatgctctgttaagggtgttgtctctgtcacttcttcaaaaagcagcacagtctcaggcacatgctccctcctgccccaccccacccacaattgatccactgcagctcttccaagatgcttccctccattctagtacctccccttactcctgagcccctgtggcctctatcttactccctctctccagttctttgtaccttcctcctctccctcactcacctcccctcccatgcaaagcccctactggttccccccttccccccacttcacctccactcacactccatcttcaccctccattccagtccttcccttcctctcctcactctgactccaccggtgaactcacttcccatcccttctgtccatgtccctgcctcagtttacctcccttcccctctcctcaccttccttggatgcacctgacctctcctgcctccctccccttcattcatgcccttcctttcttctctctccagttccatctcctccaacatgctcccctccccctttccttcagcctctgttgacctctccaccctcccacagtcccctgcactctcctgccaaggacatccctcccagccatccccgccctcctcacctcacctcgtttggctccatgtccctcagctccccttccctccctcttccctgtcccaagagccatctgggtttcctttccagtctccctctgcttgtgtgctttcttccccttccctgacttcccctgctctatcttctcctcagttccccgccctccctctctgcacctgcccagtttcccccatctcccctccatgctccctttctcagtttccctccccagctcctgagttggaccacctcagctcagcgccctacttcctgtgcctgcccctgcctgctgcccaccctccctgcacacagctcacttctccctctggccctcctgctgagcaagtggctccccgactgccctgggcctgcccactttccccagcccccgcagtcaaggctctccacatcaccggggtgagggccgagatgcaccctctccagggctctgcttcctccagcaggtcccagatcctccctccaagctaagctccatggcccatccctcccctgggggcaacaccacagggaccttttgcccaccttgccaggcttttcagaggcctcgaagctgtggtcaggcaggcaagtggggagcaagccaggagttacagatccagagcttggggcagtccaggcagcgggggctgtggtcccctgtgaccacttctgtgaccttgccacttgaaccctccagggcctatgtcctcacctccaacgtgaagatcaggctgggccattattgcaaagctgtgctgagtgttgacaaaggtgcatgtcacgctttattacaggtagctggtgtttcctgagcatttggaaacaacgccctgtaaaatactgtgaactaatcgcagagctgggcacagcatgcttcatgatcttattttatactgacgtgttttgtcatcgtgctgtcaagtattctccagccacatcatttgttagtagtttgacctgcataggagggcagtgtcaccctccttcctgctgtgctgatttcagcgagggcctccgggccagactgccccgtgcgccccctgttgactaacctgggaatcgcccgccgcctgccttgagccttgtgatgtgggcaggacggggccggggcagggccaggagcctgcggggaggcgcggggccaggcgcctgcaggagtggaacctgcccaagatctaggagtagctcggtgcaggaccaggacagagttcacacccctggcttcacgtacacgtattttttttttttatactttaagttctagggtacatgtgcacaacgcgcaggtttgttacataggtatacatgtgccatgttggcttgttgcacccatcaacccgttatttacattaggtatttctcctaatgctatccctcccccagccccccatctccctgacaggccctggtgtgtgatgttccctaccctgtgtccaagtgttctcattgttcaattcccacttatgagtgagaacatgcagtgtttggttttctgtccttgtgatagtttccagcttcatccatgtccctgcaaaggacatgaattcatccttttttatggctgcatagtattccatggagtatatgtgccacattttcttaatccagtctatcattgatggacatttgggttggttccaagtcttttctattgtgaatagtgctgcaataaacatacagacctacacataaattaaccggtgtgtgtcaggtgtagataccagccaagaagaaaagacaaagtcagcgggggcagctctaggacagcgatgacctgggtcgcttcattctgtgcctggggaagaaccaaagccacttggagattaacgccatgacaaaaacaagggatgacgtgtgtgcagttgtgggtttcatgtttactttccacgactctagaggacttgcccacctgttcatacataaaccagtgcccagggccccactgcccggtgagggctccatctcccctatcaccccaccccctgcttagctcctggcccgccccaaccatcccttagttgatgagttggtgaagctgccccctttttcctccctataccttctcttctctcccccaggtcctgctgggccacagtcttcggtctctctgccccacctgccgaaggacccccctggtctcttgggtcctcacctgcatgctcccgagctcacctctaagttgtgtctgcccttcacaaggctggccccctgcagcccaccccctcacctggggcaccagggccatccacttcctccactctcctcacactcccgaagtgactcagggctcccctgagcagctgggctggagtcctcccaccaactccctcagttatacctgctcccgtcccctcagacccagccccccaggtctccagacccattcatggacgtggcctcctaggcctctcaacactcacctcccagcaacccctcagccctgccctccccaggcaccaacttgggacccccacagaggcagagacacctattcccacttgggctcatgtcaccctggctcactggggatgctgagcctgtgagcccaatcttgctccatccctccagttcctttctccaatccaagttctctcagacctgtggtgtcactcccagaagccatctggacacccaaggcactgcctgacggagatggccatgctcttccctgtagggatggacaagggacacctgcagtgcacaggtcacagtctcaacctttggaatggtgtggcaggctgtgccctagtagggcccccaccagggcccctgaatggctgctccccatcagtaacaaggaagacccttgatgatcatccccactgcctctgagatgggcccggaaaggcgtgagcttctcaagcacctgggtcaccatctgggaaatggcagtcatgatcaagtcaatcccttgtgccccagagacactgtaactccccagtagaatcccacagggattgaggccaccctaggcaacatagcaaggttccatctctacaaaaaataaaaacatagccaggagtggtggcacacacctgtagtcccagctattcgggaggctgaggcgggtggatcacttgaggccaggagttcgaggctgcagtgagtagtcattttgctactgcactccagcctgagtgacagaaggggaggagagggagaggggaagggagggaggagtgaggggagggagggagaggaggggagaggaggggagggagagagagaaggagaggagggaaggggagggcaggggagggagagagagaaggagaggaggggaggaagaagaggagaaagaaggaagaaggaagaagaagaattccagagagtgaagagccaccaagggtatccccacactctgtgcaagcgtctatctgcctgaaacatacatgtgtgaaactcactgttggcagcacaatcaagacggaaaattagacctgagagcagcctctgtggtctttgagagggacccaggggatgaccagaggcagggaggctccatgggagggagaaacacaagtagatggccttctctgtggcttccagcctggggcaaagggtggtcagtctcgagatgcccagtaggggaaaggctcgtgtgggaaaagggaaatcaaaaatcctgccacctgcacagcacaggggaatcacccaaggctccaaagggtcattactgtgatgtctgtagcataacatccacatcgctgtaacatccacaggggcctccttaacaccatcaggctctggaatcggagagcagaagcttcacagctgtagctgaagtgggtctgagtacagactaatctctatcgtgcagcttactattatccctcctttagggacatggtcattttaaaatattttattttgaaataattatagaacttatagaaaactgcaatagcagcataatgggtgcctgctcccttcacccagctcccccagggcttctagttttgccatgtgtccccacctcgctgaccagccccagtagacggcaccaaaggcaggcaggatcacacactcctctttgctcaaaacactcagggatccttcctgccccacacaccctctccatgcacccacattctctgcccaagggtggcctggcccccaggcccagctcatccccagcatgtgactcctttcactcaggctgtggatctcatgtattgcaaatgtggtttaaactttgagaacagcaattctggtttgtagaaaaaaagtgaggatctaggcgtttgcagtcatgcacatgttcgtattttaaatacaggccaatgagctgctgcctagtgtgcctaccagagacacacctgttgttaaactacaactggatttactgttccattctgcaaaaatacgccatggtgctgtggagggtgcagtgagaggcttggaagagccttgccacaggctgtgtgtgtgtgccagctggccatgggtggactaactggagaggggctggctctgagttgagcactgttaggaagcaggaggaggtaggtatacactggaatcttcataaacctcatccccggggaggcctgacacgggcaggacaggctatcaccaaggccaaagcggcagtcatcatgtgggctgggagaggacacggctggcactcctggcctgagagatgctcccatctgtctgtattcagacaggattctggagtggcttgtctttgtcttgatcagaccatctggggtcttgcctgctgctggtgtcctgagggacagtttgtgttctccaggagagccccacaacctcactgagggtgccagcccagctcctgggacacagccaccctcctccttctcaagctttaatgagaaacgggcaggaggttgccggagaaccactgcccatcttccggggtgctaggggtgtctgctggcagttgtggtctagggcaaaaagagaagggaagggaaaatctttcagaaaataacggaatcacaatggggctgcaggcgagatgagcaaactgggctggtggcatccagggcgttagcaaagaaaaaagcaccagtgttcaggcagccagggagcccagccgctctcttagggtcaccccctcccagccctccggaggccacccttgtcccgccctgccccaagggcacagcccgcgcccctcccccagtcctctccctgctgggctgccccctcccgcggccgcatccctagtcagtccctgagaccgtccagagttcagtccccgggatcaggcttgcagtgttgggccgccctccttgccagatgccgccctggagagggcaagggcgcagaaagggctgagcgtcccgggtccctgcgtggccgaacggcatgtgagcacattccaggaataaggaaacgagaggagtaggcatttctaccgtctaaggcactttgcatgaaatcccgtggcactggaaaagtagttcaaacaaagtaacgctggcttttacgatgcagataaacggataagcggcgtaggactcaagtaggagggctccgtgcacaccaggcgcagcccagcggggatttgcctgcgcgtcccagcgcacagggaggtcgctgagtcccagggaagccccctgggctcgcgctgcaaactcaggcagcctctgctcctgccctacggctttgagggcacgtgctcctccggggaggcacagcttcctctaatttcccacttcctcatccggcccttaattcactaaagactaacagggaatgatgttcattaccaaagtaggtgctccccctagtgtagcacagaacgcggcgctgttctcactattgaattggaataatatttttagtatcaaaattaattctagaaatctattacagttcattttccagaaaacaagggtagcaaaaatagtataggtttgtttcttaatttctttatgacacacatcactggttcatgtgataacgtgtggattctcacctggaagacacaagaggaataaaatcaccatattttaaactctatctcaagtctctcaacatttcaggctgtgctcatttacacactacagaatgatgagtattcagtggaaacttttgcagaacaattaaaattgcaaaatcggagccgggcgcggtggctcacgcctgtattcccagcagcactttgggaggccgaggtgggagtatcgcttgagcccgggaattcaagaccagcctgggcaatatagtgagccatcatctctaaaaaaaaaaaaaagaaaaagaaaaaattgcaaaattacctaaaatgaaatgcatacattgaaacgcccacaattattatgaaaattaaagttaatattaacaacatatgacatgagccacaagatttacattaaaatagtctagttgacaataacttgaatatttaaataaagtcctctttatctctaaataatatatttacagtctgccattatatgaatcacttaaaattcagatgaggatattaatcaatattgacaatttcttcaggaatatcaagtgaataataatgatttcacttttttgtttcattttgtttttgacataagatcttgttctgctgcccaggctggagtacagcagcaggatcgtgactcactacagcctctgccttctgggctaaagcagtcctcctacttcagcctcctgtgtaactgggaccacagatgcacaccaccaggcccaggtaattttttattttttggtagagacagagtcttattatgtttcccaagctagtcttgaacttctgggctcaagcaagcctctcacttcagccacccaaaatgctgggatgacaggcatgagtcaccatgcccagcataaagattttattatgtggaaataaaaggacattaaaatataacttgaaataacccatttctcgcaagtatttatttttccaccagttaatcaaatagtgccaacactagacaccaaccccacttccattgctaatcccactaatacactcaccaagacttcaattcctgacccccatgtctcaggatactcctcaatagccattgccatagtatatccaaaaacaaccatcgtaccccctagataaattaaaaaaaaccattaaacccatataacctcccccataattcagaataataacacacccaactacaccactaataatcaatactatacccccataaataggagaaggtttagaagaaaaccctacaaaccctattactaaagccacacttaatgataataaagcatatgtgattaatcccacatggattacaaccacgaccaatgatatgagaaaccatcattttatttcgactataagaacaccaatgaccccaacacgtaaaactaatccactagtaaaaataatcaaccactcacttatcgatctccccgccccatccaacatctccatatgatggaacttcagcttgcttcttggtgcctgcttaacccttcaaattattacaggactattcctagctatacgctactcaccagacgcctcaaccgccttctcctcagtcgtccacatcactcgagatgtaaactatggctgaatcatccgctacctccatgccaatggcgcctcaatatttttcatctgcctcttcctacatattggccgaggcctgtactatggcttatttctctacctagaaacctgaaacattggcatcattctcctactcacaaccatagcaacagccttcataggctaggtactcccatgaggccagatatccttgaggggccacggtaatcacaaatctactgtccgccattccttatgtcggaacagacctggtgcagtgggtttgaggtggttattcagtagacacacccactctcacacgattcttcaccttccactttatcctacctttcattattacagccctagtagtcttacacctactatttctccatgagacagcatcaaataacccctcaggaatctcctcccactccaacaaaattaccttccacccctactacatgaccaaagatatcctaggcctatttctcctccttctcaccctaataacactagtactgttttcacccgacctcctaactgatccagataactacaccctagccaaccgcctgaatactccaccccatattaaacccgaatggtattttctatctgcctacgcaatcttatgatccatccccaacaaactaggaggcgtactggccctcctactatcaatcctcatcctagcagcaattcccacacttcacatgtccaaacaacaaagcataatattctgtccactaaaccaattcctatattgactcctaattacagatctccttatcctcacatgggttggaggacaaccagcaagctaccccttcatcaccttcggacaaacagcattcgtagtttactttgctacaattctagccctgataccgcttgcctccctactcgaaaacaaaatactcaaatggacctgcccttgtagtataaaccaatatattggtcttgtaaaccagaaatggagactctctcccaaggacaactcagagaaaaagtacttgacttcaccatcagcacccaaagctaagattctaatttaaactactctctgtattctcatgagggagccattttgggtacaacccaagtatcgacccaccccaccataattttatatatatcgtgaatttctgctagccaccatgaatattatatagtactataattgcttaactgtacatagtacatatcaaacgaaactcaacaacaactcctccccacgacgcttacaagcaaggactagaataccttaactaacggtaacacattaaacccaccctccaaaagaaacttctcaaccacaagcgtaccaaaaaacactatatatccttgagtacatagtacatctaatcgctcatggtagatagcacattccagttaaacaagtcctcgtcaatacggatatccccctcagatagtggtccgttgttcaccatcctctgtgaaatcaatatcctgcagaagagtgctactcttcttgatccaggtccataatacttgggggtagctataatgaactgtatccggcatcttgttcttacctcacagccataaagtcaagaccaaccacacgttccccttaaataagacatcacgatggatcacgggtctattaccctattaatcagtcacgggagctctccatgcatttggtattttaatctggggggtgtgcacgcgatagcattgtgaaacgctggccccagagcaccctatgtcgcagtgtctgtctttgattcctgccccatcccattattgatcacacctacattcaatatcccaggcgagcatacctatcacaaggtgttaattaattaatgcttgtaggacataacaatcagtaaacacacccacggccgcttttcacatcaactctacaataaaattctgcaaatccccttcccccatctttggcctcaccaacccaggaaaagacatctttgccaaaccccaaaaacaaaaagccttaatccaactcaaccagagcccaaatttttatctttaggctgtacgcatttttaacagtcacccctcaactaacacgtctttttccctcttagcctcacttcacagactctacaaatttagttatccctttttcagccatcccattcaacgcatgcccgaccactactaaaccaacaccctaaactaacccaaccccaaaggcaaggctttcccccctacccattgcttgtatgcccatcccctagccttgcttacactgtgcaatcacagtctatgtagcttaatgacccaaagcaagacactgaaaatatctagatgggcctacactgccccatagacaaataggtttggtcctagcctttctattaactcttagtaagattacacaagcaagcatcgccaccctggtgaaataaccctctaaatcactacaatcaaaaggagtaagtatcaagcacgcattagtgcagctcaaaacactttgcctagccacacccccacgggagacagcagtgataaacctttagcaataaacgaaagtttaactgagctatactaactttagggttggttaatttcatgccagccaccacggtcatacgatgaacccaagctaatagagactggcgtaaagaatgttttacattatccctcaataaagctaaatttcacctaagttgtagaaaaccctagttgatataaaacaaactacgaaagtggctttaatatttctgaatacacaatagcgaagattcaaactgggattagataccccactatgctcagccctaaacttcaacagttaaatcaacaaaactgctcgccagaacactaggagcaacagcttaaaactcaaaggacctggcggtgcttcacatccctctagaggagcctgttctataatcgataaaccccaattcacctcaccacctcttgctcaacccatataccgccatcttcagcaaaccctgacaaaggccacaaagtaagcacaagtatctacataaaaatgttaggtcaaggtgtagcctatgaggtggcaagaaatgggctacattttctaccccagaaaattctacaataacccttatgaaacctgagggtccaaggaggatttagtagtaaattaagaacagagtgcttaattgaatagggccataaagcacgcacacaccacccatcaccctcctcaagtatatttcaaggactatctaactaaaacccctatgcatttatatagaggagataagttggataaaccaaggtgtagcttaacataaagcaccctgcttacacctgggagatttcaatttaatttgaccaccctgagctaattctagccccaaacccaactaattctactaccaaataacctcaactaaaacatttacccaaataaagtataggcgatagaaatgatatctcggcacaatagacataataccgcgatggaaagatgaaaaaacataaccaagcataaagtagcaaggacaaacccctataccttctgcataatgaattaactagaaataactttacaaagagaaccaaagccaagacccccgaaaccagacgagctacctaagaacagctgaaagagcacacccatctatgtagcaaaatagtgggaagattcataggtagaggtgacaagcctaccgagcctggtgatagctggttgtccaagatagaatcttagttcaactttaaatttatctacagaaccagctaatgcctttgtaaatttaactgttagtctaaagagggacagctctttagacactaggaaaaaaccttgtagagagagtaaaaaatataacttccaaagttggcctagaagaagcgatcaattaagaaggcgttcaagctcaacacccaaccacccaaaaaattccaaacacataactgaactcctcacatcacattggaccaatctatcatttcatagaagaaataatgttagtataagtgacatgcaaacattctcctccgcataagcctacatcagaccaaaatacttcactgacaattaacagcccaatatctataaataatcaatgaaaccattattacccacactgttaacccaacacaggcatgcttacaaggaaaggttaaaaaaagtaaaaggaactcagcgaatcttacccctcctgtttatcaaaaacatcacctctagcattaccagtactagaggcaccacctgcccagtgacatatgtttaatggctgcggtaccctaaccgtgtaaaggtagcataatcacttgttccttaaatagggacttgtctgaatggctccacgagggttcagctgtctcttactttcaaccagtgaaattgacctgcccgtgaagaggcggacataatacaacaagacgagaagaccctaaggagctttaatttatgaatgcaaacaagaccaaataggcccgcaggccctaaactaccagacctgcgttaaacatttcggttggggcgacctcggagtataacctaacctccgagcaacatatgctgagactataccagtcaaggcgaatatccacatacaattgacccaataatttgaccaacggaacaagttaccctagtgataacagtacaatcctattctagggtccacatcgacagtagcattaacgacctcgatgttggatcaggacatcccaatggtgcagccgctattaaaggttcgtttgttcaacgattagagtcctatgtgatctgagttcagaccggagtaatccaggttggtttctatctattctacatttcttccagtacgaaaggataagagaaatggggcccacttcataaagtgcccctgccccatagatgatattatctcagcattttactgtacccacacccacccaagaacagggtttgttaagatggcagaccccagcaattgcataaaatttaaaactttacaaccagaggttcaacccctcttcttaacaacatgtccataactaaccttctacttcttattgtacctatcctaatcgccatggcattcttcatgctaactgaatgaaaaatcctaggctacatgcaactacgcaaagggcccaatattgtaggcccctatggactattacaaccttttgccgatgccataaaactctttaccaaagaatccttaaaaccctcaacgtcaactgttaccctctacatcactgccccaaccttagccctctctattgcccttctactatgaactcccctccctatacctaaccccctagttaatcttaacttaggccttctattcattctggctacatccagcctagctgtctactctatcctatgatcaggatgagcatcaaactcaaactatgccctgatcggcgcattatgagcagttgcccaaacaatttcatacgaagttaccctagctatcatcctattatcgatcctactaataagtggccaattcaatctctgcaccctcattagaacacaagaacacctctgactactcctaacatcatgacccctagctataatatgatttatttccacactagcagaaaccaatcgagctgcttttgaccttactgaaggagaatcagaactagtctcaggcttcaacattgaatatgctgcaggcccattcgccctattctttatagccgaatacataaatatcattaaaataaatgccctaactgccataatcttcctaggtacaatatataatattcacctaccagaactctacacaatatgcttcaccattaaaaccctattcctaacctctctatttttatgaatccgaacagcatacccccgattccactacgatcaactcatgtatctcttatgaaaaaatttcttaccatttacactagcactacttatatgatacatctcaatatccgctacaatttccaacattcccccctaaacttaagaaatatgtctgacaaaagagtgactttgatagagtaaataatagaggtttgaatcctcttatttctaggaccataggaattgaacctatccctgagaatccaaaattctccgtgccacgtgtcacaccctatcctggagtaaggtcagctaaataagctatcaggcccatacccagaaaatgttggttatatccttcccgtactaatcaatccactggcccaacctgtcatctactccaccgttttcacaggtacactcattgcaacattaagcttgcactgattttttacctggacaggattgaaaataaacatactagcttttatcccaattttaattaaaaaaataaacccccgctctacagaaactgctatcaaatactttctcacataagcaaccacatctataatcctcataatagctatcctctccaacaatgtactctccggacaatgaaccacaaccaacaccaccaacaaatactcatcattaataatcacaacagccctagtaataaaactaggaatagcccctttccgtttctgagtcccagaagtcactcaaggaacccctctaatatccagcctacttcccctcacatgacaaaaattagcccctatttcaattatatatcaaatctccccattaataaacattctccttaccctttcaatcttatccattatagtgggtagctggggtggactgaaccaaacccaactatgtaaaatcctagcatactcctcaatcacccatataggctgaataatagcagtactagcatacaacccaagtatcaccattttcaacctaatcatctatatcattctaacaaccaccacattcctggtactcaacttgaactctagcactacaaccctactactgtgccgcacttgaaataaactaacctgactaatacccctaatcccatctaccctactatcactaggaggccttcccccactaactggctttctacccaaatgatttatcattgaagaattcacaaaaaataacaacctcattatccccactaccatagccattattactctctttaacctatatttttacatacgcttaatctactctgcttcaattacactattccccatatccaacaacgtaaaaataaaatgacaatttgaaaatacaaaatccacaccactcttccccacactcactgtccttaccaccctcctcctaccaatctctccacttacactacccacctcatataaatttatgttaaacgcagactaagagccttcaaagcccttagtaagttaataatacttaatttctgcagcacccaaggactgcaaaaccctactttgcatctactgaacgcaaatcagccactttaattaagctaagcccttgctagatcaatgggacttaaacccacaaaaatttggttaacagctaaataccttaatcaactggcttcaatctacttctcccgccgcaagggaaaaaaggcgggagaagcccaggcaggattgaagctgcttctttgaatttgcaattcaacatgaaaggcacctcagggctggtaaaaagagagtttttagatttacagtctaatgctttgctcagccatcttacccactaatgttcgccaaccgctgactattctcaacaaatcataaagatatcggaacactatatttattgtttggtgcatgagctggagtcttgggcacagccttaagcctccttattcagactgaactaggtcaacctggcaaccttctaggtaacgaccacatctacaacgtcatcgtcacagcccacacattcttcataatctttttcatagtaatgtctatcataattggaggttttggcaattgactggtccccctgataattggcgcccctgacatggcatttccctgcgtaaataacataagcttctggctccttccccacccctttctactactgctggcatctgctatgatagaagctggtgccggaacaggttgaacggtttaccctcctttggcaggaaactattcccatccagaggcctctgtagacctaaccattttctcccttcatctagcaggtgtctcctctattctaggagctattaatttcatcaccacaattattaacataaaaccccctgccatatatcaataccaaacgcccctctttgtctgatctgtcctaatcacggcagtcctactcctcctctcccttccagtcttggccgctggcattactatactgctaacagaccgtaaccttaatattacctttttgacctggccggaggaggggaccctatcctataacaacacctattttgattctttggtcaccctgaagtctatattctcatcctaccaggctttggaataatttctcacatcgtaccatattattccggaaagaaagaaccattcgggtacataggtatggtctgggctataatatcaattggcttcctagggtttattgtatgagcccatcatatattcacagtagggatagatgtagacacacgagtttactttacctctgtcactataattattgccatccccactggcgtcaaagtatttagctgacttgctacgctccatgggggtaacaccaaatggtccactgcagtactctgagccctaggattcatcttcctttttacagtgggtggcctaacggacattgtactagcaaactcatcattagacatcgtactacatgatacatattatgttgtggcccactttcactacgttctatcaataggagctgtgttcaccatcatggggggcttcatccactgatttcccttattctcaggctacacactcggccaagcttatgccaaaattcactttgccatcatatttgtaggcgtaaatctaaccttcttcccgcagcactttctcggcctatctgagatgtcccgatgttattccgactaccccgatgcatataccacaggaaatattttatcatctgtaggctcattcatctccctaaaagcagtagtgctaataattttcataacctgagagaccttcgcttcaaagcgaaaagtcctaataaatgagcaaccttccactaacctagagtggctgtagggatgccctccaccctaccatacatttaaagaaccagtctacataaaacctagacaaaaaaggaaggaattgaacctcctaaggctggtttcaagccagcctcataacccctatgactttttcaacaagatattaggaaaactatttcataacttcgtcaaagttaagttacaggttaaaccccgtatatcttaatggcacacgcagcccagctaggtcttcaagacgccacatcccctatcatagaagagctaatcgccttccatgatcacgccctcataatcatctttcttatcagctttctagttttatacgccctcttcctaacaattacaacaaaactaacactaacatcacagacgcccaagaaatagaaactgtttgaatgattctacctgccattatcctagtcctaattgcccttccatccctacgtatcctgtacgtaacagatgaaatcaatgacccttcttttaccattaaatcaatcggacaccaatgatactgaacctatgaatacaccaattatggaggattaattttcaactcttatatacttccaccactattcttagacccaagtgaccttcgacttcttaaagttgataatcgagtagtccttccaattgaagcccctgttcatataataattacatcacaagacgtcctacactcatgaactgtccccacattaggcttaaaaacagatgtaatccccggacgcctaaaccaaaccacattcaccgccatacgaccaggagtatactacggtcaatgctcagaaatctgcggagctgaccatagcttcataaccatcattctagaactaatcccgctaaaaatctttgcaataggacctgtatccactttataggctaccgcccactctcttaataaggttcactgtagagctgacccagcattaaccttttaagttaaagactaagagaatcgctatctctttacagtgacatgcctcaactagacaccaccatatgacccactatcgtcgcatcaatactcctcacattattactcatcattcaactaaaagtactaaacacaaactaccatctgcctacctcactaaaaattattaacatgcaaaaccacaataatcctttagagtcaaaatgaacgaaaatctgtttacttcattcattgcccccacaattctaggccttccagctgcagtgccaatcgttctatttctccccatgctgattccagcttccaaacaccttatcaacaaccgattaattaccactcaacagtgactaattcaactcaccctaaaacaaataataacaataaataacattaaaggacgaacctgatccctcatgctaatatccctaattatcttcattgctacaaccaatctcctcgggctcttgccccactcattcacaccaactacccaactgtcataaacctggccatggcaatccccctatgagcaggtgcagtaattacaggcttccgctttaaaaccaaaaataccttagcccatctcttgccacaaggcacaccctcacccctcattcccatactaattattatccaaaccatcagcctatttatccaaccaatagccctagccatgcccctaactgctaatattatggcaggccatctgctcatacacttaatcagaagtgccacactagcgctatcaactatcaacctccccacaacctcaatcatcttcacaattttgattttactgacgattctcgaaatcgctgtcgccctgattctagcctatgttttcacactcctagtgagcctctacctacatgacaatacataatggctcaccaatcacatgcctatcacatagtaaaacccagcccatgacctctaacaggggccctttcagccctcctaatgacatccggcctagctatatgattccacttttactctaccaccctactaacactaggcctactgaccaatgcactaaccatataccagtgatgatgtgatgttgtacgagaaggtacataccaagaccaccacacagtacccgtccaaaaagtccttcggtatggaataattttattcatcatctcagaagtctttttcttcgctggattcttctgagcattctaccactccagcctagcccccacccctcaactaggaggacactgacccccaacaggcatcactccactcaaccccctagaagtcccactcctaaacacatctgtactactcgcatcgggagtttcaattacttgagctcaccatagcctaatagagaacaattgtaatcaagcaattcaagcactacttatcacaatcttactaggcatctacttcaccctcctacaagtttcagaatactttgaagccccctttactatcgccgatggtatgtatggttcaacatgttttgtagctacgggcttccacgggctccccgtcatcattggttcaacattccttactgtttgccttatccgccaactattatatcattttacatccaagtaccacttcggcttcgaagccgctgcttgatactgacactttgtagatgtagtttgactattcctatatgtctctatctactggtgaggatcttactcttttagtatagacagtaccactgacttccaattaactagtttcgataacactcgaaaaagagtaataaacctggcactagccctaacagtcaacaccctcctggccccattactaataaccatcacattttgattaccacaacttaatatctacataggaaagtctaacccttatgaatggggtttgacccactatcctctgctcgcattcccttctccataaaattcttcttgattgctatcacctttttattatctgacctagaaattgccctattactacccctaccgtgagccctccaaacaaccaatctaccactaacagttgtatcatcactcacattagttactatcttaatcctaagtttgacttatgaactatcccagaaaaggttagactgagtcaaattggtaagtagtttaacagacaaaaacaatgattttgacttgttagattatgatagtcatacttacaaaatgcccctcatctacataaacattacattagcatttactacctcactgttaggaatactaatctatcgctcacacctaacgtcctccctactatgcctagaggggataatattatctccattcatcgtaaacaccctcataaccctaaacacacactctcccttaattaacatcatacctatcaccatattagtctttgctgcctgtgaagcagcagtgggcctcaccctactagtctcaatttctaacagatacggtctagattatgtacataacttaaacttactccaatgttaaaattaattatccctacaatcatactacttccaacaacatgactctctaaaaaccatataatttgaattaacataaccactcacagcctaattaacagctctatcccactgttatttttcaaccaagccaacgacaatctatttagctactctctttctcctctgaccccctgatgacaccccttctaatactaacagcctgacttctacctcttatgatcatagcgagtcaatgccacttatctaacaagtgccccttacggaaaaaaactttacctgtctgtactaatcacccttcaaatctccctgatcataacattcatggccacagaactaatcatattgattattagtggtgtagttgggtgtgttattattctgaattatgggggaggttatatgggtttaatagttttttaaatttatctaggagtatgatggttgtttttggatatactacagcaatggctattgaggagtatcctgagacacgggggtcaggaattgaagtcttggtgagtgtattagcgggattatcaatggaagtggggttggtcttatgagtgaaggagtatgatggggtggtggtagtggtcacattctttgctgaacaaacggtacctcaaataacttcatacaaatactactgggaaacttagcattttattaaaatgtttaaatttcctattttatcaaatctaacatattagtaataatatattccttttattcaactttaaagttctattcaacaatagcaatttataattttatattattaaatgttattcatacagtttaataattttataatttagcattaatgaaaccagcacagacaatataatgttcatgatattttatgtatatgtttaacatacacatacataattcaacattaatggcttccttaattaccattaatattataattttatattatcatttaagtttgcccttctattttaatattagatgtcttagcatccatcagttctatcaagctcttctcactggttcttctttgaattccagacatggccacaatcttctcttctaaaattctaaaatctgagggctctcgctggctgggtgctgctggaagaactgtaacttggttgttatctcaacggtattttattttaaatgtttcaattaaaagaagtttttaaaaatgtggaaatccctgagaatattcacttttttaaatacaatgggaatgtatttaatgtatggctgaagtctgtttctcctcgtttgatccaggggtgcttctgagaactcttccaagtgccagatcctgggccgctggcagcttggccccagtggcagttcagttaccccatcacggctggggcaccaggggagccccacaggtgggcgaaaattaccgtagattaaaacctaggcagtttaacacaagcagccagcaccaacatcacggtacttgatcttccaacttcctgcactaccaattctatgtctcatcacattctcctctggcctctcggcccccagcacacaggcttcagcctctgtttctgctgaagccctttcttcatacactctagaacatagaacataggacagagagagagactttagtaggaatactgacatttaaaaacttatcagagatatgaaaaatcaactacatgaagtacggcggtatattaaggctttgtgaataaaaacacagtaaagggtgggtgtgtaaagctattttccaaccatccttccaaaccaaggcttttgagggcacaagtcctcccagcaggtggcaggatgggcccagcagtgtcttcagcccattgctgtcatgagttaggaaaggctgaattctattttacatacaaaagaaaacatttatttaattaaagattcaagctacaatacagttcttcataaaacactacaatattttgattatcaatgtttttctgttgctttttctcatgaaacatgatttgcctttgtgaaatctgaagtttcctattctatcaatgagaaggtgtatcaaatggatagtccatccagtgtatccgacatcaattacaaaatgcctccctttttcttaattttgccttttttccctttgtcattcttgagtctctgttagtgcactgaggaagtgaagacatgtacttaaagaaatgccaacatctgctgaagatcagattccgtattttgtattttagttgatgtaatgatgactttagttataatgactttagttgatgtaatgattctaatgaacaagaaagattttgtttcccattttaaaagatatcattaagtcatgcagaatatttttcaatttattatgggtgtgtatgcaaggggttgccatttcacctgcttcagtcttccctctaaaccaatcctaagacacacctaggctgaattcatatcacatgaaaattcatcacatgatgtcctactaggtcaaaaagtataaaaactgacattacggagaaagacttcattgaaaccaggacagaaagacactaaggcacacagtgctcagagcggcatgctgacaagatctctggtgggaggccattgcctggacacctgctgggttttgtcctggacaccattcattcacttgagcatgtttggtacccagggtatttttcaataataggcaaaatagaatgagttcttcaaaccttgtggattttatactgaaaacttccagagatatatcttaggtaattataagaccaagcacaacaacaacaacaaaatcctaacttgaatccatcagttgcagatttcatggttgactacatcaagaggaagttgcaagctctaaaagctggaagaccagtcaatatcaggaactcctcagaagtgaaggaaaagtggtttaaatttgtttaacaaaaccatgttttcaaacttactttaatttatgcatgagggccattaaatttgttctttttaaaaaggaaacttcttaattggaactaaatcattcattattcactgtgatacgggttatatacccttaggttccatgtgattattcacatgttcagctgacagaaaggagaaaaagctactctaatgacttagcttcgctttgactcactggtttttatctcattttaacttccaatctcggttacagagagtgttaaagctggaagaaataacattttggtagatggtaaaggataagtacgagtcatttcaagttgttgaagctttcattaaacaaagcaagctatttgaaatcttaaagctatttaaataaagggctaagacttttccgttttatttacttaaaagcttaaaagatactgttgaaaatttaacagttaatctattgtagggtgtggttagacacttattttgacagtgctcactgaaaattcaattatacccccggagtcaaacttgccagtcatcaaaatgtctaacgatctgagtgttcacggggtaataacaaaccccatactaaacagtttgctagaaatctgtcctataacatctaaacggaacaattgggtggttgtctaagacacctaagctcaatatgacatttcagctaaaaagagtgaacttataactaagcacttcatgcaagttaccaaaagagaagatattctttaataaaaaagtacatttgtagaatcaaagaatctcagtgttgtaagaaatatttgagatcatttcagttaggcttttcatttcttaaatttgaaactgaagctgagattaaacagctaataaaaagacaaagccgatccatgatattggtttgggcaatgatttcttagatatgaccaaaacgcacatacaacaaatgagattacatcaaactaaagagcttctatacagcaaagaaaacaattaacagagtgaagagtgacaactcacagactgagaaaaaatatttgcaaatcatatgtttgataaagagctaatacacaaaacatacaacgaattcaactcaataacaataaaacaaccttgttaaaaaatgggcaaaagacctggacagatatttctccaaagaagacatacaaatggccagaagagatattaaaaggtgttcaatatcaccattgattagggaaatgcaaattaaaatgagatttcaccttactcattttagaatggctattacaaaaaaaatgaaagacaagtgttggtgaggatttgaagaaaagagaacacttgtaaaatgttggtgggaatgtaaattagtgctgccactatggaaaacagaagggacgtttctcaaaaataaaaatacataattactatatgacccagaaattctacttctgggtgtatattcaaacgagttaaaatcagtatgttgactagatatcaacacttccatgttcattgcagcattattcacaatagccaagatatggaagcaatctaagcgcatatcaagggatgaatggataaagaaaattatatacacatatttatagtgtatacacacaatggaatactattcagcctttaaaaaggatacaattctgtcatttgtgaaaacaaagaaaaatctagaggatcttacataaagtgaaatcagtcaggtacagaaagacaaatacatcatgatctcacttacatgtgaaaagtaaaaaatgtcagactcatagaagtaaagagtagaatgatggttaccagaggctggaggaggcaggatagacagaaaaaagaagattaatttgttaaatggtacaaggttcagctagatagaagaaataagtcctagtgatctattgagcaatagggtaattatagttaataataatgtattatatatttcaaaattgtggagtatattttaagcactctcaccataaagtagtgataaatacgtgagttgaaagatatgttaattcacctgatgtaaatgttccacaatgtatacatgtatctaatcatcatattgtatgccataaatacatacaatacttaattatcaaataaaaagttaagatggagctgagccaagaatccaagtctctgaatttagatttttcattttctattatgccaaagtgttttctgaaaattaaaattgaatatggcatgtccaaaagaatatgtcataagaagacaggaatggggggactgctgcatataatctcatatttttagtcagttttgtaacatattattaggagaagaaaatcaaatattttaagaaaatttttataactcctgtaatactgtaattttatggcaaacctaaaaccttcaaaacacagagtttttttaaaaaagtgaatcatatatatgcaaagtttttattgagattattaaagcaaaatccctcaaagtagcaaaacataagtatatgttttagactgtactatgcagaatagcagaatggtaccaatggcaaaaaatctttcaaaagacataaaaattattgaggtctcatcccagctctactaatctatgtcttagcaacctagtgtaattcctacaagttctgaacactgcctttaatgtatctgcatggttcccatatcattttataaacttcaaatattcacactttataattgaaacaatatacaaactttattattaaataagctatgggatgatattctccatctaccctataaggatactatcttcctgtcagaaaatctgagactctccaatacatatttactccccagatcttttctttttcttttttttttttttttttgagacggagtctctctctgtcgcccaggctggagtgcagtggcacaatcttggctcactgcaagcactccccatatcttaactgtggaatctccagaccatgtccagtcagtaatccattattagttttgtctcatgtgccctaaccaccttctctttaccttctatttcagccccaaataaaagttactattcttggctcaattctccaaatcctttgaaggtaactggtgacactatagcttttctttatgtgccaccttgtgatccaggcttcctagttatctgtgaatattcacatcaggttacctggactccatagaggcagcaccaacaaaaaacataattgggatatacaccacttttagactttcgattacatgccccaccttataatgtgtgaactgatttcacttctagacattcaactttcaaacaggtatgctctgtattaaacaccaacatcctccttccctttcactcaagggacatcgggaaaacaaaaagatgcaatgcaaagttcacatataaggataattatttgtgataatggtgacaatgatccctatttcttttcctgctcttatgaatttgcaaatgtcctacaaactgtattaaatgagtctgtgaaagttcatctaagtccctagtattattattttttaactctctagaaagtcctagccacgtagctcaaagcaaaatagaaaagatccaaatcattcataggacaagtgttgaggcaactttcaattactaaatatatttttagccatttaaaactaaaagaaaagtaacgtctgtaatcccagcactttgggatgctgaggcaggcggaacacaaggtcaggcgatcgagaccatcctggctaacacggtgaaaccccgtctctactaaaaatacaaaaaattagccaggcctggtggccggcgcctgtagtcccagctacccaggaggctgaggcaggagaatggcttgaacccgagaggcggagcttgcagtgagccgagatcacgtcactgcactctagcctgggcagcagagcgaaactccgtctcaaaaaaaaaaaaaaaaaaaagtaagaaaactcttttactcctttttatgatttaaattttattttaggtttgaaaagtgagctatatatcacttaacagtcaggaagcgtgcagtaaactcaatctctgaaccgacgttacctaaatcaaagatgttcgttttctcatactcatctctaaaacagaggtagacagagaaagtgcttctttttccgagattgtaatgaattcaaacctattcattaactttatagcagttattttggtttcacagtgaaacataaaaagttctattttattggaaagaaaaccaagtagctatctaagtagttcatgagaaggaatttgttctactgttttaagtgcatgagggataaagcaagacttagaaatatttttgttagaccatttcattttaatagtattttctattataacagaaatgacctacagtaaaataattcaaaatacccttacttctgaaggttatttccacataaaattgtaacattactatgatctaaatttaaataaattttctattgatgttaaaagtttgataatatacagtttgttaaagtggtttggtcactatttgggcacgatcgacttcaaaccataggtgtttaaatgaaccaaagtcttttgtttatttctatagctttttgcctagtttgattaataactagtataccagtcattcacatatagtcataactggccaaccaaggtttacttggtaggagggtgacagtttaccctttaataccacctgattaaaatacacaagatgttctacacaaataacaacaaattgtttatttctaagaacataattttccttttataggaagctctcaactttaatttggagtcacattttaattttataatgtaataattcaataaatggtcattagatattgggttatttggaaaactgcaaaaaatcaaacttctgacaatgtcctttaaaataattaactcagctggaaatagttaaacaagacttaaaaatacaaatcataatggccaggcatggtggctcacgcctgtaatcccagcactttgggaggctgaggcgggcggatcacgaggtcaggagatcgagaccacggtgaaaccccgtctctattaaaaatacaaaaaaacttagctgggagcagtagcgggtgcctgtagtcccagctacttgggaggctgaggacagagaatggcttgaatccgggaggcggaacttacagtgagccgagatcgcgccactgcactccagcctggggcaacagagcaagactccatctcaaaaaaaaaaaaaaaaaaaagaaaatacaaatcataacgtgaatattcaaatgattgtacagtgtaacaattgtatgcaaataattaagaatagtgactataataaaaaagtttaatagatttgacatcaacatttaaagaatataacttacatatacgaaaataagccatcaaaacttgaagctgtcaaattgtgaaaaacagtagtaaacaataaaaatcactgactcattggaaacactgcaaaatgtcatgaaaacatttcagaaatgaaggtacgttaatgaaaaataatcatagttttaaattcagtctcacctcacctttaagaaacagtgtaaaacagcaataaatgggataatttatattactgcaataaaatgcaaatatatatatattgtgtactagcaccctctcttcaatgtatactttaacccaatagctttctaccactggaaatttatcataagaaaataatggtggcttacacctataataccagcactctggtaggctgaggcagtaacgtcagttgagcctaggagttccagatcagcctgggcaaaatagtgggattctgtctctaccaaaaaaaaaaaaaaatgccagtcatagtggctggcacctgaatccttgctgcttgggagactcatatggacctaggctgatttgagcaggggtatcatttgagcacaggaggtcaagtctgcagtgagctatgatcattccatcgctgcagcctgggtgacagagcaagaccctgtcacacacgcaaaagaaaataattcagaatgcgcccaaaaatatataaatatatttctgaaagctgcatttgtaatactgcaaaatcaatgccacattgagacaggggtaccaagattaaggtagagtcaccaatgacaattaaaatctggagtcagaatgctgtatctaagtaggacaacaatttctctgctgcagcctaccattaccatgcagcaaagttgctctattacttctgaattttccacattcttaaagaaaagcagaaaatccagtttctaagacaaaaatcaagttataagtattgacagaaaaatcacttttaaataattgtaaaagtaacaacacactataacagtaaatctaattcagcctgataccaggctgtaccaatagatataatgaaactgcataatattggtaaaacaattgtatggtagaaaaatactggcataaaaatgttcatagcaaattcataaatggaaaaagtagtctgttttatttaaataaaaaggagctaaatgaatggcagacaactacaaattaatagtttatacctttcaagtttagaattaaggatatatttttctttattttttgttttcattattgtgatgtattatgctgaaattagcaaaaaaaaaaaaaaaaaaaaaaaaaagagagtatctgaccaatacagaaatttgtattgagaagtaaggtgtgtccctaacaaacccacctatgagtcagtttgaaggtagcaagaaaatttttatcactgtcatatacttcagaagtatttgtgtacctaatgatttccagtgtcatcaaacataggtaagaacactgagtattagcactggttgatatttggtctctacaatagtgagtatggtggttaattttagatgtcaacttgaatggactaagggttgcctagagagctagtaaaacctattaaagtattatttaatatagtattgtagaatatacgttaaatacattatgttacatgtattctaatgcaacacattataatatattaaagacattattccattaatacagtacttagtatagtattacttaatacattaaaatggtaactaagcttgacgaatccctgagcaaagccagttagacctcataagcagcctctcaaccttgcttgttttgcaaacattaacaaaacttcaggtattttttgtaaatgcctatatgaaagaaaaacagaactttctttttctttccaaataggagtgtttactatagttttcctgttcctgtatcacattacacactgaatgtgtgggagagcagagagatttaatttacaagttttagatcaagagagcataaccagatcccaggttaagacttaacactacagaatactcatgttagtaatactcgtcctataaaaagatacacttttcactgtaattgctgcaaacaataaaatactgtaaaataatatgcagtgtgtttgtgaaaggtcaataacatgtttatatttttgctgttgaaaaactacacaaaaacaaatgactacaacagcagatcaattagtatcagtagaattataccatcaaaaattccactgagcttgaatgtaagatctgacataaccagataattccatggcaggggaataaactgcatttacattctctttctaacaattagtgcaagcatatccagataaactatattgattctacattatcttagagtgaaatcacctaataacttcttcagtagtctttcttttaatttttatcctaattatccgtctgaaaatgatcttttaaattgggaaaactctgattacattacatccttcagttcagagtagcattgggtaaagacattttggctgcagacaaatcactctttcatagtcatcagctttcagaacattctaagactttattttccatctaaacttttcagttaatttgactctaacttttaattgatgttactgagcagcaaaggagcctgaaggacactgctttgtttggaaaaatgaagaaagaaaggaatgtaaatcctgtaaatgtaattctaacgaaatcaagataaaatatagtgtttataaaaggaaatacaattatttctaataactgtactttcatttcaaataattttcaacaaattagtgatgtagaataaatacaattccagaagaatccaggattttttttctattgcatggctttttattaaattatagctacttgaaggctttgagaaattgaacaccagtaaaactgcccttcttttgttaatatgttttgttttcttttttcatttttaattcaactagtcattcacaagaaaaaattcactcaggtaaacttttttgattattctttcatagcatttaacgcgtgttatttattgtagtcttttgtctatgaatctattaatgctaagaaactgaacattcctaggagtgtcctaataagaaagaaacattaacaatttcagctgtatttttacttaaataaatattcatatagtttacctttcaggatcataacaaacactttaattatataagaaggtttttgtatatacatcagactaccaagaagtcatatctgattttgtgcttttctactactcttcccccaaacacttgttcaaaaagtttacttttaaagggtctgaactgtgtgtcaagcactgacatcagcatgttacctgaattaactcattaaactcttgtgatactcatgtggtattagcagtgaagaaactgaagcacagaagcttcaagtaaaatgtccggttttagagcaactgaacagtagagtatggaagcccagttactgaccttgtaccattgcccagtattgtgaactgacctaaaaaggcctatgagatatcaacccattaagatccatgacataaagaaaattgtttgtcctacaatatcccaatctggatgaaggcacataaagagaatatgcttaagcatgatgacaaaaaaataagaaagaactgtgaatgaactttacaaaacagaaaagaacacaagggactttggaaccaagttgaaaattaaatatgttcatgtgcacataacaaaagagtgatcataaataaactgtgtcaacactgtactatgaaggtgaaactttctttttaggattagttaaaccttgtataagttgtaaaaaaatgcaaccacatatattgatgtactaaacccaatgtttcttttggcttatatactaaaaacaggaattccttcctgtaatgaagaaaaaacacaggcatcaaggagtaacaaaattaatgtcttagaatctaaaatatagaaacaccaattaaggctttttttacataatacatgcaaaaactgcatcagaatttacaaaaaatctacagcgtaattggttctggcaataagcagtcacattctgctggaggtaactttagtaacgtcaagcaaaggtcttaaaattatgacaggtggtattcatttaaaatactcttaagagctcttagaaatcaagaacacagtatctggacccttatccacactcaatctctttctaactgggaaattttgggcaaagttttaaactttcttgaacataaaatgcctagctagcaataactttagaaaatactaggagtttgtaaagttacaagaatcaaatgagttaataaatgtaatgtacttaatgtaataatgtgcaaaataataattcattattttaatatctaaattctctagcttgtagttattttgaacagataaatatatataattaaaatttctaacatgtgtttttgattacttatcatgtagaaaaatacagctttccagatgaaaatatagtatataatgtagaagtcacaaataatatttattaaactggaatgctatcattttaaattattttggagctcattaaagtaagtctgcactggccaactttttatttattaattaaatttttgcctagcacagttaatctccttttctaagacttaattcccaaatctatagcctttcttttcccatttggagatgagtgggagtactgttcctttcttgccaatcccttcctctattttcattataataaccaatatgcccttgcctaagcatatgcccccagttaataatacagattcactgtactgtctcaccaaatttaacctgttatttttggaaacagggtttgtttaaaaatgggtttgttatttcttaatacatgccaaatgtcatcagtatatcgtggtccagatgtattctaaataccaattgaaaaacattcttaaagctaagaacacacaacatacttcacagagtgaacaactgtgagaagcctggggattgtaggcattcttggaaaactattatttttttttccatgtgtgtcaagcatttgcataggttatatgttttatagctccagttataaaaatagggaataaattatattccctcacatctgtacaaaatagcaagaatacacatctacagaagtttaaagtatttactctttttttttagttaatacgtttcagaaccttaaagagagcaaatcataatacccattgattataatgtcacattttagttattacattattacatttacttattataacttttagaattttaggagggaaaaaataattctgagtgtgaaatttgaatatttgcaccctaaaaatttccaattccattttcaataatttagtagaatgtttcttagagaaataagaagacaattaaaaatatgaagtactactaggttttcaagtatattgcaaagccataaataatatataatctatcagtggtacaataattaatatattttttcaattatattcagttgtaagaactcaatgctcctaaaatttttaaataatactatataaaagcaactcaaatgatatcagctcaaattcatgtatacatctttgcagctaacgtcttttaaaattaaaaataatttaaaattttgtcatacatttatgaacccattttaaagaacataacatgtcatacaaatgttaatttaatacacaatgcattagtaaaaactgttctgtatacatatgtttatgttagaaaactatttttaaacagcaattcgattctattgattcatcaaattattaaatcacaacattgctaaactcaatttttactctcctaagcatattggaatctatgagaatatacagtagagataataatttgaatagaatttaacttatatgttttagcaaagaagaaataaaaactggaatattatgggtttctaacatgcctatttgtttgttagttttccttttaaaaatttctttatagaagcattttgagtgaagcccacagattatttaataacttattagttatttaaaaaagtctgccttgttgacaatgtggaaaacaccatagagtggggtcccccaccccaggagctgcagaccagttagctgctcataacctgttaggaactgggcctcacagcaggaggtgacctgcgggacaggtaatgctgggtggcattaccacctgagctccgcctcttgtcagaactcagagcggcattagattctcataggaccaggaaccctactgttaactgcgcatgtgaagaatataggttgcacactccttatgagaatctaataactaatgcctgatgacgtaaagtggaagagtttcacatactcccccatccccacaacccactcacccagccatccctggtctgtgaaaaattttcttccacaaaactggtccctggtgccaaaaagtttggggaatgctgtgttaaggtgaaaaagggtacatgtggtaattgtaaaaaaaaaaagttcaataaatataggaaaaaactctaacatcatatgtatatgtggacatatatacttacatatacatgattttctgatttgaagaatgtataaaaaatgagaaaatgacattgaaaacctttttaaggatcattcattaatatactctcgctctctctatatatgtattatatactatatagtatatataatatataatacatataatatatagtatattatatattatatgtaatacatataatatatagtatatagtatatatattatatacatataatatataatatatagtatatatattatatacatatactatataatatatagtatatatatttattatatacatatataatatatagcatatagtatatagtatatatttatatacatatattatatattttatataatttatatttatatacatatatattatatataattacatattcatatatgtatatataatatataatacatgttttatatatattatatatatacattttatatagacagggtctcactatgttgctcaggctggtcttaaactctagctcaagtgatccagtcttggcctcccaaagtgctgggattacgggcataagccactgtgcctggcccatagttaagtacttaagtcaaaactgatcattgtacctcctttctcttcctcgcttcattcttgaaaggaattcaacactgaaaaagaggtggagacttaactgagtcattcacaaataagaactttagaaaagtgaaaaaacatagttatacaaatcatttccaatgatttgttcatctttaaaacataggccaatatttctattttacccaactttactcagctgtaggatgcagtccagaaacatcttagtgtaagagtattttttcataaaatgtaagatattttattcaaattgaatggctgatcagccataagaattccactgtaaagtaaccaaagaagtacaattcttacaaaacaatcatgaaatagttttaagaattaaagaaaaagtaatcacttttcaccaggaatcaaacttttagttggcatagcataaaataatttctcacactggcaaaaggaaaacctccagaaacctccaggcaaatgtcctttccccactcccactcctaaagaaaatatgggctagaccgaggcaccatgatctctcctgcctcttggatttgctctctgtatcccagggctgtcttctagtctaatctcactcataaagctgagcaaatggcataccaagacagaggatctaacatgtgtttgaccttttggaggcatctcaagtccctggattccacctcctgttctccgtattttcaaacatgttctcgaatatgtgtttgacctttctgaagtatcactagtccctggattccacctcctgttctatatattttgtaatgttaatgtccaatttcatttttaaaatgtgagtttctacacaagttgtttcttatttgtacccgaagactttgaataggctctggcactcccagacatgggatatcaaacagatgcaggccttaagtaggtcataggactggacttacatacaagtggctgtggcttgtgagactaggttgtagtggtttttttgttgttgttttgttttttcattttgtctaaggacttgaaaaccttcaggggagacgtgagttaagatttgtcttcttctagtgatcttcttttaaaacacaaatcaatcctgttaaggaatccattaaattactattagtgcgaatggacttttttaggtagcatggatgaattcaatgtaaatgcaaatgtagtatgtggaagaagagccattctcattctatgaacataggacaaggatgagaatatatataacctatagttaatgaaaaatatatatttctgatttatgtgaaatcaatttaagagattacataaatatattctatagatataatatgattttcatcagagcacagaggatgaagagagaagagagaagataggagtggtggctactagatccttttgggggattatttttaaaaaggcagtttttggcaataaaaggggactaacaccttctaatagatatccactggcttgcagaaaacaaagtgtcagaaaatttatcattggagaaaagtcaatgtttccattagtattaatgtggctaaagatggctcaagggtaaaattattcaaaatactatgcatcacaatagtgccaccctgtggactactctctctctcaccctatggggaaaggggctatgtgaaaagaaaaagaatttctagcgcagcaaaacaaaattctttaatttttttacatagaaattgatagtgtttgctatcagtgatgtaattattttacaaagaagcccttgaactatggcagaacttctggatgctctgtcactatgtgtcaatctcaatatatcaatcataacacgtgtgatttggggttaatatgaaggaaaaacaaacttctcttcggttaagtatattttccgagatttaaattagtttcccaatttttttccccaggtttccaaattcttagtgtaacaccaaccaaatatcaaaatagattattagagtttcgatacaataaataaaattaaagagtaagcttataattcacattatttaattacatgcattattagagaggacatttcattaaagcatgcaagttgcattttttttttttaaattttgacatgtagatagtttaaactaaaagccagccaacactttgatatagcagaagacaactgggaaatgtcagttgactaaagtggttatttaaagaaaataaggaaacacaatattctttttgtctattgatatgtgatgctgtactgttattgggcaaactttttaaataatagaaaactctaatgcttacgatgacaaaaacatgttctgtaaaatagcactgtatatgaaaatagtacaaaagggggaaattagaactctgacaccacagtatcaatgaacatcacacagactgaagatcacagtagtgaatgaccaacatctttaggctggaaagagtgggaaaaattaagaatttcatggagatgttattttcaaaaatagactcaataaaatcaccaaactcaccactgggttcagaatgtgatcaaccatctctttcacttttatgttacctttgtggagttttattaatggaaatgaagaaatttactagaaaaacatgattgcaggcactgttaaatttactttctctttgtataatttcatgaaagtgacctgaactgctttgcagcattagtagggaaaaagataaatttatgaaattaaaaggtgagaatacataaaaagtttttatctttccagtgagaaagtgataatcataatgtttagttaaagctatcatctaaccaaacccatcagtacgctaattgtttttaacttgagattttaataatgctgaagtatttccgtcacctcagtattagtgcttccttgtttaaatctcaaagggccaccatccaaggctgcaaatatacaaatgataaaattttggtatttaagaatacccatcttctagtaggacagccatgacaataataatggctttgatagaagaaaacaagaaaatttcaagaagataaatactagggaaagtttttagattaacatgcaagtatgataccctccctcacaaaaataaagttcattaacactaagcctgtaaatttcatagaatacttcttgaactaggagaactggaatcacccatcctgttagaatgcaattaattggaccctcttgaacccgtatcttgtgtgtcaggagttgtaaatctgttaagcatcttcaggcactaaacaagatctgaatactaatgggttcatttatttcactgattactgtatgcagatatgaaattccaggcactgatttttcattaaaccactctcttaaggttaacttgcccctctcttttcacctgaatccatatgcttgccacgtaaattgtaatattgatttttaacatttccccacagttcaaaaatattgtttgcaaaaaatcaagggccttttctaacaattcatgtaattcctgttattagctaatgtgtaagagtagggaacaattaaacatactgtatacaaaatcttaccatcctgaattgcacccaagatattagttcagtcatccttcaaattacctcacaactaaaaaggatcagatacttaaataaaaacttcaggcaaggtaggaaagaagtcttttatcatccctgtatattgcaaaagtgttccattctctctaaattcacattatatttattaatgagcagcacatggaaagaaagaaaatgagagagagagagaaaaagagaaagaaggaaggaaggaaggaaggaaggagagaaggaagagaagaaaagataaagaaggaaagaagtcaggatggtaggaaagtgagagacagaaggagagctagagataacgatgagagaattaaaagagggaaactctaatgtctttgatatcccccaatttaaaagagaaggatgtgaccccctcccccgtttacatataatggaacaagccaagtctccattcactgcatgtggacagtaagaaaacttgcatggggaaaacttttggggggaaatgaaggtgatttccgagctgctactgcagttatatatgacactgacatttatttcccataattcttgcccacaggaaacacatcctttaagaaactgaataaaatcaagtttgacattctcataatctgcaaggtatcaacttccctgagaagctcacattcccccaaaacacacacatgtatgtaaggagcgagacattcaggagatgagctgtgaaaggtacttccacattgtgagggtgccaaggatttggttattcctgaacctgaatccgaaaagcgggggtggggtttgcgatgacaaatgagggtgagaagaatgtttccatgaaaccagacacccttttggaatctaggctgagaatcaggatcccacccccttgcctaccgccaggctccagtaagcaacctctggcgtcctcccctctgctccttccgcagcagcagacatagggatccctagcagccagggagcttaggtcccgccgagagctcctgccaagcgcttctctctcgactagttatcaattgagaaaaaaaggatcagactcacaacaaggatggtgatcaaaatccagtgtcaggcaccagggtcccagaaggttccggctcctcttctgcgcccttacccagctcttttcgcctcgcaaagggtcacccagggagccaccagcagcagatccttcccttttgctcctcctgatagcgccaatcttcgccaccactgccacactgcgcgcccgctatccactcacggcacaccgagaaggcctggcggagacagcgcagggggaggagggtggattaaaaggatagatttttggaagggtaagggagaaaaactttgatgttgtacccacacacaggactgagaagaaaccaaaagaagttgcagcttcaggagctgggaggacgctttcgccagctcggaaaaaaaataataataaatcaccccctaccaaaatcagggggaggaatcttcctgctccttgagcgatcactgagcacacctcgcaatctctgatcttcgaacccactgaaaaagcacaaggcatggggagtcctgttggttcacgcccggggtgcgaataccaaaagcacctcccgctggaaaggctgcaggaatctcgaggcaaagacagaggcaaacgcaacgctgggaagagcgaggggtgctgccatctgcaaaagcagagacgcgtctcccttcgggcaaagtgactgttacaaagtctgttccctcctgcgcaaggacagagacatttaaaggcctgaacggacgtcagcaccagtcgagctcgctgggtgagcgccaggtctccccaccccaaggatagcgcgcacagggcgatctgctgctcgcgaggtagagagtggcttacttggggagaaaacattgaatctgtaaattaccttgggcagtatggccattttcacgatattgattcttcctacccatgagcatggaatgttcttccatttgtttgtatcctcttttatttccttgagcagcggtttgtagttctccttgaagaggtccttcacatcccttgtaagttggattcctaggtattttattctctttgaagcatttgtgaatgggagttcactcatgatttggctctctgtttgtctgttgttggtgtataggaatgcttgtgattcttgcacattgattttgtatcctgagactttgctgaagttgcttatcagcttaaggagattttgggctgagacaatggggttttctagatatacaatcatgtcatctgcaaacagggacaatttgacttcctcttttcctaattcaataccctttatttccttctcctgcctaattgccctggccagaacttccaacactatgttgaataggagtggtgagagagggcatccctgtcttgtgccagttttcaaagggaatgcttccagtttttgcccgttcagtatgatattggctgtgggtctgccatagatagctcttattattttgaaatacgccccatcaatacctaatttattgagagtttttagcatgaagagttgttgaattttgtcaaaggccttttctgcatctattgagatgatcatgtggtttttatctttggctctgtttatatgctggattacatttattgatttgcgtatattgaaccagccttgcatcccagggatgaagcccacttgatcatggtggataagctttttgatgtgctgctggattcggtttgccagtatgttattgaggatttttgcatcaatgttcatcaaggatattggtctaaaattctctttttttgttgtgtctctgcctggctttggtatcagaatgatgctggcctcataaaatgagttagggaggattccctctttttctattgattggaatagtttcagaaggaatggtaccagttcctccttgtacctctgttagaattcggctgtgagtccatctggtcctggactctttttggttggtaagctattgattattgccacaatttcagatcctgttattggtctattcagagattcaacttcttcctggtttagtcttgggagagtgtatgtgtcaaggaatttatccatttcttctagattttctagtttatttgcatagaggtgtttgtagtattctctgatggtagtttgtatttctgtgggatcggtggtgatatcccctttatcattttttattgcgtctatttgtttcttctctctttttttctttattagtcttgctagcggtctatcaattttgttgatcctttccaaaaaaccagctcctggattcattaagtttttgaagattcaatgccaaccccatcaagctaccaatgcctttcttcacagaattggaaaaaactactttaaagttcatatggaaccaaaaaagagcccgcatcaccaagtcaatcctaagccaaaagaacaaagctggaggcatcatgctacctgacttcaaactatactacaaggctacagtaaccaaaacagcatggtactggtaccaaaacagagatatagatcaatggaacagaatacagccctcagaaataacgccacatatctacaactatctgatctttgacaaacctgacaaaaacaagcaatggggaaaggattccctatttaataaatggtgctgggaaaactggctagccatatgtagaaagctgaaactggataccttccttacaccttatacaaaaatcaattcaagatggattaaagacttaaacattagacctaaaaccataaaaaccctagaagaaaacctaggcattaccattcaggacataggcatgggcaaggacttcatgtctaaaacaccaaaagcaatggcaacaaaagacaaaattgacaaatgggatctaattaaactaaagagcttctgcacagcaaaagaaactaccatcagagtgaacaggcaacctacaaaatgggagaaaatttttgcaacctactcatctgacaaagggctaatatccagaatctacaatgaactcaaacaaatttacaagaaaagaacaaacaaccccatcaaaaagtgggcgaacgacatgaacagacacttctcaaaagaagacatttatgcagccaaaaaaacacatgaaaaaatgctcaccatcactggccatcagagaaatgcaaatcaaaaccataatgagataccatctcacaccagttagaatggcaatcattaaaaagtcaggaaacaacaggtgctggagaggatgtggagaaataggaatgcttttacactgttggtgggactgtaaactagttcgaccattgtggaagtcagtgtggcgattcctcagggatctagaactagaaataccatttgacccagccatcccattactgggtatatacccaaaggactataaatcatgctgctataaagacacatgcacatgtatgtttattgcagcattattcacaatagcaaagacttggaaccaacccaaatgtccaacaatgatagactggattaagaaaatgtggcacagatacaccatggaataccgtgcagccataaaaaatgatgagttcatgtcctttgtagggacatggatgaaattggaaatcatcattctcagtaaactatcgcaagagcaaaaaaccaaacaccgcatattctcactcataggtgggaattgaacaatgagatcacatggacacaggaaggggaacaacacactctggggactgttgtggggtagggggagcggggagggatagcactgggaggtatacctaatgctaggtgacgagttagtgggtgcagcacaccagcatggcacatgtatacgtatgtaactaacctgcacaatgtgcacatgtaccctaaaacttaaaagtataataataaaaattaaattaaaaaaaaaaaagaaaacagatctggtggcgctgctgagtgtcaaaccctggagcccatcatcaagacgttatactggtggcagttctgctgtgagtgcacttgccgaattgaacagagccagagctgcgtggagagagagctggccactctgcacgcgcgcagccaatattgggttaccaaggagctcaacacctggtttttagaaaaaaacacttctctctttaactctggtttgagtcagtattctgatttgcttctgaaagttagttgaaatccatcgagatgtctttcacaagaaagggattagactttcccgtcttggaattccaatcaagataatacttaatctttccttaacccccactgtgtacttcctaactcacagtcacaatggatgaaagtattcaagcatcttcaaatgaccattaccctgcattctaagacgatttgcctacttagacgtcctttagtaactgcaaattatattttttcaagttcgtttgccagctggcttcagatcaggttcagtcaatgaaaactggtgtgtaggaaattggccggtgcccaaagagtaacagttaggttgttcctcctcctttgcctctgctatgggtgacatctacaccattacctgtcctctaagtggttctagcttccatcagggaatgctggctccttgtctttagtagcttgaccttccccctttatactttcaacctgtttctgattataatttgacttctcatataatcagagggagacaatttactgatttcaatcaattactattctctatattttatttatcatactataagactgcattttatgtgtgttttaagcatgattcagccactcaaaatttgacaagagcagcattggtatcttccaaaaggaaggtcaaatcctgctgtgtggtaaactaattaccataagatctacaaactacaggcttagggttttactttgatgactgttatttttataattctgagtatcagtgttcaacatatttgatggctatcctcatcaaatgatcctaatttatttattcactaatttatgtactctttgaaaatatgtattgacatcttctgtatccctgtcctcatacatctctcagttttgttgcaacagaggaaagaatatggtgaaacaaggagttggccccttcttgacaacttgtgcagacacaagtgctttgaatggggaagagactgggaatgcaattttcttagtgtggtgagctattctgcaatattataacagattcaatatctaaagagctgcaactcaaaatgaataagataaattgaagtgttgtgatttaagtgcaaattaaactctcaaaaacattaaaatacaggttttgcctgtaattaacaaagcaaagagagagtgtaaatcttatgcagcaattagattggtccatggtaaaacggaggtagctggtaatttatttttctatgttggggaagaaatttaaaaacaaatatagtaaacagcaattaatgttttatgatttgtaaataaagttatatttttaagattgaagcctctcttaccattctcaaagagccatttcaagccttgaatctctcagggcttcagtctgaattattataactttccagtttgagaacatttttcatttattcaacacttaaattgtatgagattatattttcaggaacaattatgtttattttttatatgaaataaaagtggacaaaatattaactgataattgtaaaagtattacaagaaatacaaggcatattataattatgtgtcaataaaaagagaaatgcctgtaaaattataataaatcattcaaatatcttaaaagcaaaatgcataaaatgtagaatgtatatattttcatttgaatgaccattttttaattaaaaaaataaaaggattcttaaaacattcaattagaaactacggattttcagcttttcccgattctattagaaatgtaaaacaaaataaatttaaattcaaaaacatgacagacccttcataatgttttctctgcctactcattccatgtcacttctaatttctccctccatacaaaatatgttgaaatcatactaaatctttgccttctgtgcttttattgtaacacactccatcatctttacagttgcaattttctgttcatataatttgccttctttcttccattttatggcttagcatctttttatctttcttggatcatctaaggtttagttttcttgtggaaatttacattggctgcacttcctagatattcccattgggcgttgatttcctcttatagcacttcctccactgcgatgtgttgccacactaactaacatagctaacctgttatacagtaagaactgttaggagagagttaggataaaaagactaaagtgggtagagttagggtttgggttacaatactagctgtatcttgatttgctagcatagcatacatactagtcaacaagtatatatgtattgaatatacctataaataaatcaataataacttttaaaacatagacctttggtttgtatcttataaaaagcttccctaaaatgtatgaaaggtctcactgactttatgaaatatacattgctctgatttcttatttatttttatttatttatttatttattttgagacagagtacctctgtcacccaggctggagtgcagtgtcacaatcttggctcactgcaacctccgtctactgtgttcaagcaattctcctgcctcagcctcccgagtagctgggattacaggcgcatgccaccataccagctaatttttatatttttagtagagatggggtttcaccatgttggccaggctggtctcaaactcctggcctcgtaatctgcctgccttggcctctcaaagtgctggggttgcaggcgtgagtcaccgtgcctggccccttgctctgatcttagtcttcttaggctctggtccttaatatttgagaatgtctgacaggacccgtgaattttattttttaaaaattgtatatgcccaaaatttgcatgcagtttgtatggaattttgcaaaatgtatggaaatcctgaagtctggcttgtttttttcttttttttttttttggcagggtctcgttctgttacccagactgggatgtggtggtgttatcgtagcttactaccttgaactgctggactcaagcaatcctccaggctcagcctctgagtagctgagattaaaggcatgtaacaccatgcccagcttattttattttatttttttcagagacaaaatcttgcattgttgcccaatctggtctcaaactcctgtcctcaagtgatcctcctgtctaggcctattaatcccaaagggctgggattccaaacatgagcggctgtgctcagccttgaggttctggctgtaatctggctgttatttatggaaacaacagaagttcttggtattagcagcagtcattcttcttgagagagtcaccccacaagactgagatgaatatatttaagaacccaaaatgaggtcattatggcagaacagaattgatagtgcacattaaaagacattacacactttgggtgattcaactaaatcatagtctgaaatgcagttacaaagtggtaatgttcaaaagatcatctattagtcaaagttacaaggaaagtcctggttatgttggtaaaaattgatatctgtgattatccatcttcaaatgatttgttaaatgtttattaagataaaaaagttacatttcaaaagtatttatattatttgtcaattcctccataacaaattatcccaaaataaagtataataataaaatttaaaaaaagatgagaaacatattcttcaccacaggaaaaaaaaaacaacctttattatctcaaagtttctgtggtgcaggaatctgggcatggcttaactgggtcttccattcagagactctcacaagttataatcaatctcactcacatgcttgatggtgtattcagtactttgacagctgttgtccagaattccatataatgtgagcctcttcggtatggaaggtttcttcatcaaaatgtgccaagccaaaaaaaaaaaagctattgaaaagagtccaagacagaagtcacatcttttgtcacctaatcacagaatcaacctctcatcatgtttgctgtattctatgcaacagcagcaagcctatagatccagctgacacccatggggaaggtattagacaagggttggaatcccaggagatggagaccattagaaacaatattaatctgctgattacagtagtttgccaaagaatcctgagataataattctgggctcaaaattcttatgaggcactgaggcaggacaataaaggaacagaaaataatactatattaattttaatgatttattaatactaatatactggtataatgtgctaaaatagtatactacatttttggtaatttgtccaggagtaatagaaacaaatccaaatattaaatatcaaagcatattataattctatgataattaactctgtaatttaaaaagtctaatataggaatataccaaaaaagaaagttttaaaaatatactttatttcctaatatatcaaaatggagccttcacatatgaaattagtaaaatatttttgacctaataatttcatttttagcttttctcttaagaagtcatattgtttgcaaaaatgttatgtaccaaggagtttataacatgcagttgtagtcaggaaaaattttaaattaaaaatgtgcaataaatatatgtaaaaacagaataatataggcatctaaatagccctatataaaaagacaaacataacattacaaattagcattaaccaaaaatatgctctgaagtacatcccttgattaaatttacttaagtttcttttggaaaaaaataaaaataattgtatttgctagtaagagaaggtagaacattatttgcccatttgttttcagaagtaaaacaagacatttatgttttcagaagtaaaacaaatacaatattttctaagtaataaggttgagacaagaaaaaaacagcaatgagtaaaaatgtctatttacatgcttttacaggaaaacaagacttaactactttcttccaaaaaaaaatttaagtagaaatgttattgttttactaaaagtaaatacattttacatacttctctcataattttaatctgaagttcagttatggtgatcatattagtcagtgttttccagagaaacagaaccaacaggagagaaaaagagacagggagatgaaataaggcattgtttagcatgattatgggggaaaagacgtcccaagatctgcagtcagcaatctggagactcaggagagatggtggcatagctccagtgtgaaagctggcaggtttgacactcaatgaaagccaaagtttcagtttgagtccaaaggtgggaagaaaccaatgtcccatctcaatgcattcaggtaggaggaagttccttcttactcctaggaaattcagcctttttattctattcaagatttccactgattgatgggacccacccacatcattggggaagtctactttactcagtctatgaattcaatagagaaaaagatatacataagctatcatttaaatttttaaaaaatcatttctaatcaaaatgtagcattttaattgtgtttttagagttttgtaagtgtccttaatttttcagcttattcttaaaaaatcaatttcactttattcaaaattcccttttggaaaacattaaatggtggcccatataatcttagactttacatgctttttgataaatataacattaaaagtagcatgtgtagtaatttaaattacatatataagatgtacatatattattctccagaggaaataaaactgttaagaactctgatttagtcagggttctccagagaaacagaagtgatagaagatgtgtgtgtgtgtgtgtgtgtgtgtgtgtgtgtatacatatatatatatatatagagagagagagagagacagagagcgagagaagaagtgaagagaagacatttattaggagaattggcttatctgatttcagaggctaagaagtctcataataggccatgtgcaagctggagaaccaagaaagttgttagcatggctcagtccaaatccagaggcctttccagactttaccactaatcaatacactatatttagaaaggtatcataataagtctctatttcaatttaaaattctctattttcagagacaatgaaggacaaagggtcaaattttacaattattgtgaaaagagattatagagaaagggcctggataataccaaaaatagaagaaagaaccatccatctggggcagagaatcagcagtgatattacttgaaatatggaaattaataatatgtaaggttgagtttaagatctaaaatataaaagttaaatttaaatctaacatatatgatttaactctctagaatatatctactcaattatatgaaacaagcgggctgattctcaatactttatcaataataaaggtttttccaaatagttttgaagaaatatcaaagtgtctaaaaaaaaagccttagaccatgaaccatagagaaaaagacaaggtttgccatgaaaagtgaataacctttttatttccagttgtgatgtgttgatacaaaccattagcactttcatttcagtgaattatgccagttcttgctttaccttgtcaagattatatatatgattatataagccaaacatgcttccaagctgtaactcacaccaaaataataaagactgcgaatgaacgactatatttaataaaaaacaaaatcatacacttattttagatttgaaaatgtttgggcaataggttaattagatctcttttgagtgttttgtttgggatgtgtgtgcatatgaatctgagtgtatgtctttgtgtgtgtcatcagctcaacccaccttgaagaaaaaaatatgataaaataaataaataaaatatatattatcagaattcggtacagataaaaagtacaaaatttgatgaagatctctgtcttgtttatcattacacaagaaaggaaaaaattggaatataaggcaaaaattgtttgttcatactagctacttttgaacactgctctgcccaacaattttgcatccattaaaataaatataagaatcaaatatttcaaagcaatgctataaaatacttgtatgtagaaatttgttgatgccctcctcagcatcctgtccatgtcttattttatatcagcacaattcacaattgcaaaaacatgtaacgagcccaaatgcccatcaataagtagattaagaaattgtgatataaaaaaataaatatatggggatactattcagccacaaaacgaaaaaataatggggattcacagcaacctggatggaatcagagactattattctaagtgaagtaacgtcagaatggaaaaccaaacatcgtatgccctcgctcgtatgcgggaactaagctatgaggatgcaaaggcattagactactacaatggactttggggacttgggagaaagggtgtggggcgtgaggaataaaagactacaaattggatagtgtatactgcacaggtgttgggtgcatcaaaatctcactaatcacctctaaagaacttactcttataatcaaacaccacctgttccctaaaaacctatggaaataaaataaaatgaagaaattttgtgtatgcataccacatattttttaacttttttcacaggttcattgagatataatttatatattatttaattcactcatataaagtataaaattcaattttttagtgcattaagtgggtgaatatgcaatcaccacaacataattctagaacatttttatgctccttaaaagaaaccttgcgcccattagcaatctttcctcattttccctactctttctttaaacccctcccagccttaggcaaccatccatctacttcctaactaaggatttgcctattctggaaggatttgcctatcctagacatttcatgtaagtggaatcataataatatatagttacatgtgtctcactactttcacttattatgttttcaatgttcatcctttttggagcatgtattaatacctttttctttttcattgccaagtaatgtattttatggacaggccacattttattaatctactcctcaattgatgaacatttctgttgtttcctactttttgttgctataaatacttgtatgctactttttgtgtagacgtttgttttaatttttttggtgtacacataggagtgaattactgagtcacgtggtaattctatacttaaacttttgaagaactgtttcatttttctgcatgatgcttgccaattatcccagcaccatatattgaagagtgtcctttccccactttatgttttgtttgctttatcaaatatcagatctgtagattgctttgggtagcattgagattttgacaatattattttttgagttcataaatataggatatttttctatttatttatgtcacttccaactttcatcaatgtgctataattttcagtatacacatttttcacatcctacattaaaattactccttagtattttatttacttatatatttgttttgatgctactataaatgtaattactttattaatttatttttcagatagtttatcatgggtgtttagaaacaagaatactatttgtatgttaattttgtaactctcaactttattgaatgtgtttatcagctttaacgggtttttttggtggagtctaagattttctttatgttaggattacattttcagaaaacacagacgatctcaccccttcctttcctatttggatgcctttcatttcttggccttgtataattactctggatagtagattacatacaatgttttcagcatttgtaatttgacatgaaatccatctgttgcaatacactgattttcacttttcaacttgaaaacctggacatttatcactactctccctttctcttggtctagtccttatttaaaaaaaaaacctaccaatctaaactaggataattatttttctataaaacaatttcaaaggcatttaaaaaatttaacaatttttaaactttctatgtcaatgattttaaactgcggtctctcaaaacaaatccaatacctttagtaggaaaaattatgttaattcctacactatcattgggtctagccaagagttgatattaatagatatgcttatttattaccttgttctaacagttgtagtgtaagtcttgaaaatcaagtaaaaatttgtaaagattataatcgcacaaactccctctctcatgaggcacacagttaatccaaaatattatttctaacttaccataaagccaacaagtaaatacaatgtagtgtttaaaaataatcataagtatattctagaaatgaaacattaattgatactatttattgaatatctcatatttatttacatagaaacaaaggaatcaaaagcatattatgtaacattgaaatgactaaaaatacttgagatagcattgctacataaatgctatgtaaatgctgacaaaagtaaaaatgccattcgctacatttgctaaacatactgtgacacattataagtattttaaagatatatcactaatgcttgggtcaagtgggcaaaaatgattctaagtatttaattgtggaaaaatttagtgcaggggatagtattcatgtgatggaaaaattttaagtggaactcagagattagaagcagcaggaagttttaataacgtaccaggtgcagtgtataggatacaagacagaactataggtaaagtctgagtctttccagcatagctaggagacatggctaactccacctgtccccaggccttacctagaagttgaacagctccaaaccaggtaaacagaacaattttccaaagtcaatcaatttatgacgttaaagcacttctaaaatttaacctctgacttaaattagacaaaatggataaattttgatgatttttttaccaatgattttaacactgtctttatttcccaaagattactgaagtcatgtgaaataaaaggcattggagattctatttttctgacaaaatatgtaagagccttccttttcttctaagccaagtaattagggctcctttatatatatacatacatacacaacacttctagacaggaaacgatctagcagttgtaagtttttctttctcattttatgaatcctaacacaacttccatagaccatctatgacatgaactttctgacttttcctgtatttccctctttcataattagtcattctactttaggacaagaatttgccatacaagatcctctctcttgtaacatttatttccttcataactttcttaccataaatacatcttcatatccacaactttctttacatctccctccccgactgatttctgatccccatccaaacctaaaaggtcagataacacaaagcaaaacaagggagagctttacattttgagagagacctgtctgcctgaagttcttgggattccatgaggacaaagaggtttctcctaaaatgggttttgtagcaccttctgtttttctttaaggagtcccagcctgtcagaaattaccttagatcctctcatgtgggcactgagtggcaacaagacagactagggaacactggcaacaagacagacaactgagtagaaaaagaaaaactacagtccccactgtaaagatggataaactgaggcatcatgcagtttaaaaatgcatgttacatagagttgggctccacagctcactctcttaaccatcctgtaattttgcctaacctatgcccagtcactgatgcacctgtatggtacttcatggcccccttagagcttagaacctgggtttcattcctgctctacagctatataatttaacaattttcttctgaatttgttggattctaaccctatgcttctaaaattttattaatattactgaatcttaaagggagctttaagatgtctttagtctttagaaatactaaacctataaacaaaggactatatgaagttaaaactgtattcaaatttctacatgttttaagacactgaggcaacgtattaagaaacacacctaagacaatcaatctactctggacaaaaatttagatatggtctcttctaaataagctacctagtggtatttatacatattcttccttatatcaaccgtatcttacatgctcatagccttaaaaataactaaaaagtgtcagaattataggccttacacatttctgttggcttgaaaaatgatacaaaatgcataaacttctagagtgatcagtttaaaaaaggagttcataccaaaggtagtaatactaggaatcaaagagggctaaactctgcaggtttttaaaggtgaaagttaataaaaccttgtttttcattgtgaatctttgccttacaacattatacacatgattcttcccccttctttttcctcttgcaaagatgtggtgatgaaccctttgctcatgcagatgacaatactcttgaaaatggtggcagagaaaaaaaatgaagggaatatggttcacttaatcatctcataaattagaacttattacccctgtgactcctgaatagctccagaaaaaatatgtgagagacatgaaatggctgtttgctaccaatattttatgtgatgcttcattttttgattccttgaagaacacaacgcattagcccatttatgcgagaggttgcaactttttgaatttttgcataagtgaaaaattagaccttgtcgatgacatttagcagtaggatacaagtaattcccacgtgcttggcgtggaacactaggcataagtgggttaacacaattacgaaagcatagctattcaagtaactaattatacaactgacttttttttcctcatctctaaaacatagggatcagttatttaaaaaacacagtgacaagtattttatttttaactcagttttggtttgttaagggcgttgcttggcataaaaaaaacaaaaacaggaggagaaacaagaatacaaacatgacatagaagcagtagcaaaagaaaatgaagagtatcaagaaaatgagaagaaaatacacaatggaagaaaggaaaaagaacaggtgtgggaattaaaaggcctattatgataccttttatcccctcctcgattcataaaatttgagtaactccaagagtatcacaacaaaaaacaagcaaaaggatacacaaatagtcaccccctaaatttggttaggaatgagataatgctgccactcaagcctagctcgggcaccagcaggaggagggcaccctccagagactgcaggagaagggggaggactcctctttgccctatatgtaccaccaccactgccaccgaggccttcgttacaacacccacaggttcctccccaccccagaacgggatgggccctgcagtgctcctactcccccttcccagcccccagacttcctactgctaccaccactagcgccgatgccaatacaaccactgtcaccctcaatgtaccagcccaccctaccaggctcctaccacctggtccccgtgggtgccctcctaccgctccagttgagctgcagtctccatctctaccaccaacttcatgaggcaagtttcagagccatgtcatctgctcgaccataccactggcgactcctccttctcctcctgcagcctggcttggagcagctgggcaggcaaagctagaaaagcccaaaacgggactcagggagtgcaaccgttagagcctcaccttgtcatgctggtgactgggtttcagggatcagtttcattgaaggcactcacacccacttccaaagtccagcctctcctcttctggcaaaagctggccaggaactggggcctggggtgggagtgagtgccttcactgaaaccagcccctggccaagtccagctggccaggaattgctgggcccaccaaggctgccctcctcagggagcctgagtaggagaaactcagacccagccagccctccccacccaagagctggttccctttcctgacacctccacccaaagtgccctgtcccccacttcccccatggtgcctcctactacctacccggtagtcccaggtggtcttcccaacacagagcatgagggcgggccagaaaaccacagtgggtgtgggggccctgccctgcaatctagctcgagcgggagaaaattgccttctagagtctggcatctgagaagagaacgatcccttacttggagaccaccagaagaaggaggccactgctgtcactgccgccaccacctcctcagctcgccagcgccactggcagtgtagcccccatagcacccctaatctgccccctgccactagtagtgtagcccccggatagcacatccaacacaccctagtttcaggcaatgtaaccccaatatccccctaaagcactccctccacacctcagggagcataacacccggtagttctcacaatctgacccagccacaggcagttcagctcctgatggcgcactccccagtcacaggcagtgcagcacccaacaacgcccctaaaccaccgcccactgccagcattgtagccccggataactccacccaacccaccccctgccgcgggtagtgcagcagaagatagtgcccctaatccttccccagccacctgcagtacacattagtgtacacaatctgcctccccgacaccacccctgccaccatgggctgtatagccccggatagccagccaacctgccccactaccagcaatgcaacactggagagtgcccccaaccagaccactgccacaggcagagtagcctctagcagtgagcgccaataggacacccaacccttgtccccagaggcatacggggcagcctcagaaaactcacctaccccatcacatttctaccactgtggccgagctgcagtctctgacgtcaccaccaaccacagcgaggtaagccacggtggcacaggctccagcctccagcatgtggcggttcctcttcgttctagtcctccagcccagcaggagaagctcctgctgccggctgccctcctactgctctctcgccaccaccaaccgcagcgaggtagtgtcccaggctccaggctccatccatcctccagtctccagcaagcggaaggttgcggcctcttccagttttctaagttgggcacagagcagctcctctgcttggcacagaagagcctgaaatgacgtgacacgacctcagcatgctttatataccgaggttaatgcaaatgtggttcctggactacatgttctgataggacgagaaaaaaacctctaggcctactctgattggactttattttcatgctgtgatttgttgtgttaagacttgctctcatccaattacaacattataataaagtccaatcagagtaagcctggaggttttttctcatctactcaaaacatgcagcccaggaaccctcctgggcataactgcagtatataaatgatgctgaagagggatgaggttttttcgggttcatgtatcttcctgtggagttgctcggtgtagaggactaggaatcaggagtcactggcctcctatgctaggggctggagccgtgggagcggcggctcacctcgctgtggttgttggcagcgacggagctggcagcgcggctggagtggtaggagacggaaaacagttttaggatagatggaggggagtaaagagggtagatagtgccaaagggaaaaaaaggtagcttagtcagagaaggagttgcaaaaaggtggtagtgaaaagatggtgggggaaaaagtttttgggtagatggaggcagaaaaacagggtggggagtgggaaggaaggaaggttttgcagaaagacggtgggtaaaaagtttaaaggtagatggagggggaaaagagggcgtcaagtgggaggaggaaaaagagggagatgatgggggaaaacgggggtgagcagtagggagagaaggtttcgtgaaaagatggtggggtgaaaatagagtggggggggaaggtttttgggtagaggagcaaaagagggcagcaagtgggagaaggaaaaagagggtagccagcaggaggaagacaaagttttgtgaaaagacagtggcagaaaagaaagaccatggacaaagaaaagacggtgggtgaaaagtgtttcgatagatggaggggggaaagagggtgacgaggaaagagggtagcaagagggagcagggatagagggttgggaaaacgacggaaaaataatttggggtagatggagggcaaaaaagagggtggcaagcaggatggggaaagaagagcatgagcggtaaagggaggagactttgaaaagatggtggggaaagtttttgggggtagatggagggggaaaagatggaggtgagcaggagtggggagaaggctttgtgaaaagacggggggtggaaatgtttttgggtagatggagaagggaaagagaatggcaaggaggaacgggggaaagatgatgatgagaacagtttttgggtggatgaaggggaaaagaggttggtgagcagcaggagtggggagaaggtttagggaaaagacgggggaaaatgtttttgcttagatgaaggagcaaaagagggtggtgagagtgggagggggaaaaagagggtggccagggtaaggggaaaagacggtgggaagaaactggggaaagggtttgggtagatggatggggaaaagagtgttgagcaggagagtagagaaggctttgtgaaatgagggtgggcaaaaaatggtgaagtttgggggcagatggcagaagaaaaagggtggcgagagggagggggctaaaggcggtcgggaaaagaaggtagggaaataattttgggggacaaaggtttggggtagattttttaaaataagattatttgtatttttgattttgatgagttctttattttgtgtatgaaccccttgcctgatgcatagtttgcaaatacttgcttccattctctgggttgtttcttcatttttaaaaaattttaatttaatttttttttgacggagtcttgctctgtcgcccaggttcagtgcagtggcacaatctctgctcaatgcaagctctgcctcctgggttcacaccattttcctgcctgggcctcctgagtagctggaactacaggcgcctgccaccacgccaggacactttttttgtatttttagtagagacggggtttcaccgtgttagccaggatggtctcgatctcctgatctcgtgatccgctggcctcggcctcccaaagtgctgggattacaggcgtgagccactgtgcctggccttgaaacataactttattttttatttttgtatttgtatatatactttagtagccctgagttttaataaagttgcctttaaaatatgtatcttatttttcagaaatataccctaaggcatgtgattagttgggtggcatgttctttagtttttacaattgaaggattgtcattcctttatacaaaaaaagtgaatttttatcatatgctagaggaaagaaggtagatactaaataaatactgtatgcttccatgtagataaaatttgaaattatataaagacacaataccttaaacttttctggggttaaagtggggaatttcattggcaaagttcatgcaataaatgtgtaggtgaagggaacattccatatttgattatgtaggtgattatcaagctttataaatttataaaactgaactggactaaaatgtgtgccttacacgcaaattataattctataaaattgattaaaactagttagataagagagaatcaaggggaaaagagaaaaggcacgtgaaaaaataatgccaatgcactagaattatctttgatgacattaaatatagcctggtcttctcttaattctttttaaaattaatgtagatttctcaatcctttgatactttttcctgaacgcatcttatattctcatacatgttaatgtatggctacataggagaggattcttttacagctggactggaacagcttgatatttatatctagagatgcattggaaacataacactgacccgtgagcaagatgaaaatggcatgtgctagtgattcattaatatgttgctttaagtttagtgccaactggtctacatcgttgagaatgtttagtttgatggtttacacaacttgacttaagaagtgtatgaccaacagtgtatgagagagcctgctataaagacttttctgcacttcccttaaattattatagtaagctcaaatcttgaaggttcagaatatacagataaaatgtgtccgtgaggctgagaaaggatctttagggagaaaggctctgttcctgaaagacagactttcaatgatttcctgcattttatttctgttctagtttacctttacctttattaatcactaataaggtggttcttatagggcctcataggcctttttagttttccaacctattcatacttagtgcaaacctagtaattttttgcatgatagtattgggattttactctgaggctaggcttcacactgtaaaaacatctttttggaattgtatcattttcagtctttccatcgtgttccactgtcccagccacacacacaccagatatgaagactacaagcaacctcaaaaagtaacccatctatagtagatgtttttacctcttgtgaaatctaaggaaaatatactaaaaatgaaggcatcagtaaaacagtatcattttaggttgacctcgagcatttcaacatcagtctaacttcagaataatacattagcaaggagaaatggggtacttttgtggttttttacacctgttatttcaattgaaattgaaaaaaaaaactaatttgaactaaccataaaaggaaggttttatcagtattgaaataaaataacagaaaatgcatttgtgggtctgacctcaggaccgattttaaatagtcaatccctctaactctcattcccctttctctgagcattagctttattcttattccatcttacttgatgtggcactgacagatacagactcgttcttacaacatataccatcagaagtgaaaccttcacactctccaactcttgaaaaatctgagatgcactttgactattctcagattatgggtatattacttggatcaaaaagtactgcacagggaagtagatactgtaatctctgacattacagtttcaaggttggagtgagaaagggatagctccctaacaagggagtatcatagaaatgatattttcatggtcatacttctgtgaactaggcagacatcccttcatgtcaactacatctctactctactttgaacagataaatatccttgcatatacaaaattatgcagtagtgtaagcatgacttttcattaaaatttaagcaaaacagtctatttaggtgaatacatactgatacaggagatagttctgcttgaatgatctttacccttggggagagatacataaaagaatgtcatactttattatgatatgactatccagcatatttatgagtaaactttcataatacctttctctattgtctaaaataagcacaaaaacccttttagttaattaatatccctttttaatatacagaataaatagaaaatagcacaaaaggtattatgccagcacacagaaatagttccagttaaaagtcaatcctgtattttgagaacttgacaaaatcataattgaaaatagtgtactatcttacatgcagatgttgtgtaatcagggacatccaaatcaacttacatccaaatatttcacaattagtttttgaaatattctgtgaagtattataaaaccaggccctcaggaatataaaagcacaaagggagccaggactccaaatagccatttattcatttcctaaggttaggtacaatgaggactgcatttttaacattatcagggccatagagacattggagcttaaggataagatccaatttcatagcagtctgttaaagtttaagccagtctaatgacccaaatgttcaccataataattaccatcttgagtgatgatgttatgaatacaaaggaacactgcatctctaaaataaactacgtttatatgacatgagaccaatttgatggaaagaaggcaaaactgtgaatggtaattttgttttaattgttttcattgtgtgtactcatctgaaaatataataccatgtaattagaaaagttatcataacagaaaatagactggaaccttaactttttatatcaaatgttctgcacacgaatatggcctcctactgatgatctatggctccaaaatattggtagctataattatgctttgtaaaacagaagctgtgaatgtcttactacataaagacacaaagaatcatttccttactcattcactgctagtagaccctgaggcacagcatttcctgcccagatacctgattattaatccagtttttgttaggggtacactaacgttaactaacggagattggtgtttaaaccagttaatgtaaagaaatgctgtaggaactgaaatattccttttaaattaacaaaagtgttctttctagatagtcaaagttacatgaggacccaactgtataccagaaaatcatttgatgaatatggaattaataaaataatgttttgttgtatggttttagtactttgttggtgccaggttaaagacatgtggccctagataggataactctacagaagagaatttaatttgtttgcctgcttcactagaaatccaacaattaagtcagtgactctattttccaatattcatttcctccattttttcatctctttttgattgatggtatcatttcgttattttattttcattgacatggaattcattttggctaaaatgactttttgactatttgtgtatatatatatatatatatatatataattttaaaatcaatggaacaatattgtttctctacttccaagattatccctctatattctctaaagtcgataccgtgaaacagtccagatatgagtctaggaatggcagtacgaaatactgtaaaactggaagcaacttagtaggtaatcagtagggaaaatgaaactcaatataactgactctatttagttaatgtaatgatgcatttattttatatttttcatacaagtatttttttcatattttaaaatttcaaagttaagtatacatgtgactacagtcctcgcaacttctttaaggtactttatccggcagtcactagcagatgtgtttgtctaattcttagttttttttctgcctcataattttgttcacatttgctgtggagattttagaaatcacctagattgtttggtacaggaaggaaatcaaccctgggctgcctaattactgacaatctgtgtttctatggatacacatacattgatgattttggttaaccctttccacaaacagtcatacgtcccatgatagcttgctgtatattaaatcaaactttttatattgaaagtggataaagtaagccaaggtgttccagaagaaaatacatttggttctatatttttaaaaataagctatagcttgaaagtttcacctgcagtcctaacaagaaacaaattgggataaatagtccaaataaatgaaacacataaaaaaagaatctatatcaagtgtaataaattgtttacacctcaggtttttttctgctttgaaatttgtcttgacgtttgaccacatacatatttctgttgtattcacttctaaaaatagaacaggaaagatgtggacaacaaaaataggatatgaattgagagaagacgtgaactctcagaagaggagaagaatggcataaggataattagcatcgagatattgaatctcaacaaactaggacatggtggtgtagataatgatgaaagcatgcttgatatgtaaactagtaatttggtcgagcgagtaattttgacattcagatcaaatacaaataatttaataaaattagaccacaaactgcatagtgtgctcacataattgttttcattttttccttgctccgaattcaggtctgacagaggaacagataatacaaataacagttgatcccttacatcatctagctagacaaaatgatgcatatatactaccaccaatggaagttttcttcttttccttatatctttaatcttatttttaaattttatctatttcaatttataccttttatttttttttattacctaaaatgtgctatatgaataactttcagggaagcttggattaatgctgcatttgttcaatatgtgacattttccagttcctccataatattctagttaagtgtgtatggcccattaacctcctcctttgtgtttcagtgcacagacttctgtcattaatcatctgtacaactaaaaattcagttcttttttaaaactcacatcagactaaaactttagagatttgacaggcactggatacttttttattttcaaaagaataatcaaaatgtctcataactatcaaaatgaggcttagatggggaatatgtttaagacagactttgactaggggaaaaaaagagaaataacaaatccttgggtccaagtactccagtgacaagcttcaagtataaatgcaaatccttttagttgaatgagttacttattctagtttaagcagataatgctgatatcagacattttggtattatataattggtaggattaataattttatagaaaattggctcatttatctttgggatagcatgagatattaaaattaactctagaaaagagaaaataattttacttcaatatttccagtacatcttttggggcgtttcattttttaaggtacgtttttggaactacctgtaagcatatgataacaatatcagcacactagcaaacacactgttaaattttgtgaaaagacttattggcttatggattcagacatttacaaggttactatatccctcactaagaaagcataattaatttatcactgaatagatagactagttggcttttttttgaaagcccagagattatattaatttagagaatgaatataaaattgctttgcattttattgctatgggaataatttaaattgcttagtgactttttgctattttgattttgtggtggtggtggttgctgttaaattctttcattctagccatattttctcctcccaatttttcattcatttattaataatacatttattaattcatttattcattattcattatgtgaggaaacattgagttggaccacctgatgtagatataaaaacgaattaaatttttcttgccatcaagcataattgaggcagacataaaaatatttgacaaatattataattgttatagttgaagtcactattaaataacaaagtagcacagtttgagcttaaactccacctggagagtagaggaaggcttcatagaagtagggcatgaactggactttgaaggttgagaaggctcacttaagaaggctgcggggttggcagtcatatacaaagcctcagaaaggtataaccacatggagtaattgcagaaattgacataatttaatattgctttgaaattgcatagaagtggttacatataaaactggatatgtcagaacgagggtcaggtccatatgttcagctgaagaggtttcacattgtttcttgagaaatggggagtcatttcaaaaaagaggaatcatataaatagatttctgtactagtgaaattatccaagaaacagtgaagatgactgagttcatagtcaaaactggagtcagagagataacagaataattcaataaggtatatatgggaggaggagagtcgatttaacacaggcagagtgtaaatgatgagcaaagaataaatataagaaatcatataaatttcagagattatgaacctgaagtcagtatacatataggagaaatagaagtggtggatgcatgagaagtagtagttttgacaaagatcaattttctatgaaagaaaaggtacagtgcacattttgccttaaagtagctgagggtccttcaggtagagatattcagcgttgactaaaatatacagcaaaattctagaagaaaggtaatagaactaacaagattctatgctacaggtatagcattagcaattttcaatgcacagttagcagtcaaactctacccacttttcagtaactatattgtatttaactagaaatgatttttttgagaaatagattttcaataaaagttatctttagctaagaaaaagtgaaggaaagagtgggtatctagaatctaaagaaaaaagtattattcctctatggaataatttttctttctgtcaagcaacagttgagtaatgggagttatattgtccctcagggaccaaaactggctacgtaaaataataataagattatactcttaggtataaagtatggatataaatatagtaaataaatacacagtataactgtggcattaaaatttaatggaaggcaatgacttggaaaaagaaaagttcatgaatgctcctaggaaaaggtaaaaaatgaagttgagaaacattaatctgatagagggatgtgtcttcctttttttagtgaaggtatttctgagtgtaaggtatttttagtgaaggtaaaatttttagtgaaggtatttcgtatgtaatttgtgaaatcagctctcatactaaaagtgacttaatgatcacaaaatcacaaagactagtgatcttcctctcttaacattcttacatcaagttcacagtctgacattctgacatagtctgcccgctcagttgctgtggagttgaactcctctgtcgagtccatatccctaagggatcataagcttttatttctgagtaaggcagaaacttattgccaagataattagtgttagttattggaagatcattaatggcatcagcatcaaaaatcgctccaagtgggagagcttcctttctcttatggagttttcatttaataagccatgcttccacttaacgtgaccaaagaaatcggttgtattttataaattttttttagaatgtatgtacattcaaagtgagcatagatcttatacagaggatatttttaattgtatattaaaggtttttttcttagcacatatagtcttctgcataaagaagccaagaagaaactataatgataagacttctctggtactatcacataaataatgagttgtaaacaagcttaaaaaatacatacatatgatatagaatatataggcatgcactacttaactaaggggatacattctaaaaatagtgccattcaacatggtgaaaccctgtctctatttctaaaaatacaaaaattagctgggtgtggtggagcacgcctgtagtcccagctactccagaggctgaggcaggagaatcgcttgaacccatgaggcagaggatgcagtgagccgagatcgtgccactgcactccagcctggctgcagagcgagactccatctcaaaaaataaataagggctcagcgcggtggctcacgcctgtaatcccagcactttgggaggccgaggcaggcggatcacgaggtcaggagatgaagaccatcctggctaacatggtgaaaccccgtctctactgaaaatacaaaaaaattaatcaggtgtggtggcgggtgactgtagttccagctactggggaggctgaggcaggagaatggcatgaacccaggaggcggagcttgcagtgagccgagatcgcgccactgcactccagcctgggcgacagagcaagactgtctcaaaaataaataataaataaaataaatatacataaataaaaattaaaaaagtgccattaggtgattttgtcattatgcaaccatcattgggtatatttatacaaacctaaatggtatagcctactacatacctaggctacatggcataacctattccccttgactacaaacctgtgcaacatgttactgaactcaatacagtaggcaattttaacacagtggtatttgtgtatctgaacatatttaaacatagaaaaggtacctaaaaatacactattataatcttatcagaccactgttgtatatgcagtctgtcattgagactgaaaagtcattatgtggtgcatgactctattgtttaaaataagcaagtggcttctctgcctaacctatgcatgatggaaggtcatgagatttgtaatctaattcctctcatgcagagagtcactttggatagataagagcagcctaaaccctagctgaggttaagtgcaaatgggtttgcacctttaatttctaaattctagcaagcaaaattgtttaaagtatgtggaattaacagtctgactttaagttgtacttttcctgaattattttatcaacaaatgaatttaaggatttttaaaaagtatcaattgactgtgactcagtaaaattccatccaagaaagtcaatttctttctttcagtcttatgcgttcactagagatctagatctggggtagaaaacgtaaggttttcctttctaacattttactttcttacatgaaaaaagttttaacttagggtccataaattgctgctgcaagcaagggtctgttcagctgcaaaagtggtagaaaaaatatgaatgtgtattcttttgtttacttttccccctttaggagagatttttcaaaggagttcttgactcgcaagcattaacatttatctggtgctttttcggttcactcttccttttgtgtttggagggagctagtatcattctttatttggcaggagacagaaaagtcacctccatcacacgtttttatggttcccctttagccaggtttatgcttactgcagtgacagccaatttctctttcttagcacaggaagaggcaagctgacttgtgttggcttgctctctctccacatacacttctctcctcattgtgcctggacaatactaaagtctgtttgacaaggccaggaagtctcacataatctaacaaattatgtataatttttaaataaatttgatattaatcataaatgtttcatgctgcaggcattacaatgaatttcactagaatattggtaatggaagagctgaaacatctattgtgccactttgtttttttcttaagtgtaaattaatagaattatttaatgacactattggaagtgattatgaaaaaaaaacacaagagataaaccatgagacaagaacgttattcctttgcatatttcagtacagaccgacatgcagtaataccttaaaaatctgataataaataaaaccagaaaacattggcagcaatcttctttggggaagaagaaaggatttacttttgccatagggtataatacatttacatcataataacaccatacctgtgtcttttataacctagagaattgaactcttacatgatgtcactttttaataataaatgcaggaagttcaccttgagagtaaatagtagctagagctcagtaaattaactgaaggaagagaaaaaaacatatgaatagacaacagaatgttttcccttgaggaggagagcaatagaatattcacagaaaagcaattactgtgaaacatagtaaggtatgcagaaaaagtgaaaggaaagttaatgagtttaatagaaagatggcaataagaaaaataggttattaaattgttaaacttatcagtaaatacatatctatatgtaacatctgtagatcatctgcctgactgcatttatatgcacaacttaccacttttgctcgattgtaaactacatgagaacagaatctgtaatacattcattttaaaataactgacatttcctgttagaatgcctatcccggagttcagatctcagaaacacattctgtaactagggtctatccgaacctccagatccaacacgtataaattgcctgagaatatttcctgatctaggtctaggttgtcacttagaggttctcttgaacttaaaaatccagctcagaaaagatttccatatgtctttccccatgtttctctgtgttcaaacatctgagtcccaaaggctaatgatcattcaaatagaaacacaaaacaagagccttagcaaaaagtataatttctaaaccatgctgcagcaaagattccctggtaaatgtgatatttaaggaaataagtctaaacctttacctaatctaaatttcaatggcatatcatttttgccatcataaaggcaaatgctttgctagtttggtttaatttcttaaagtattgccttaatgttacaggacaccaacacttacccaaaggtggccattgggttagggtttctgcattatagtcccttctgtagtcaccagaaatatgttacaggaatagggttccaatccagaccccacgagagggttcttggatctcatgcaagaaactattcagggtaagttcaaagtgaaagcaagtttattaagaaagtaatggaataaaagaatggatactctataggcagagcagccctgagggctgctggttgcccttttttacggttatttcttgatgatatgctaaaaagcggtggattattcatgtctcccgtttttagaacatgtagggtaacttcctgatgttgcaatgacatttgtaaactgtcatggtgctggtgggagtgtagcagtgagtacgaccagaggtcactgtcatcgccattttgggttttggtgggttttgtctggcttctttattgcaacctgtatcatcagcaaggatttatgacctgtattttgtgccaacctcttatgtcatcctgtgatgtagaatgccttaactgtctgggaatgcacccagtaggtttcagcctcattttacacagctcctattcaagatggagttgtccttgtttatgtgcctctgatattaatgctgtgccttaaactattattgcaagaaatcaagaggatgttaatattcttttcagcatgactaatccttagacaggattcttcttattctaggcctctgacctctcttttcttagaacgtttacattggaacacttcccattccatattatctctttgcccctttgagatataaatcttgttaaaagcatcttaccagtttagaatttaggaatgtcttcctaaagaatctgggaaccatctctttgaaatgtaaatatttgaggagatagcaccccagtttccaatttccttgggagggcagactcctaacatcaatgagtaccaattagctaacacagatgacataatctcaaagaaaaacattttgaaaactcaggaataactaaatatgctccatacatcccacagatcagcctcccttctaacatcttgcaagacattttcactggcttaccctagtatataaaaactctcccacttcttgtttcatctgagttgagttcacagtgagttctggcctttaacatctactgcaatggctttgaataaagtattcctttcctatttaactttatccagtgcaatttttgatttgacaatagttatcaaaaaagtagtcatatcaaattgatgtttcatttaccctgtagttgttataaaatctattacctgtggactttgtttttgctgttttgagatagagtttcactctgtcacccaggctggagtgcagtggagtgatcttggctcactgcaacctctgcctcctgggctcaagccatgctcccaccttagtgtcttggactacaggtgtatgccaccatgcctgctaatttttgaattttttgtagagatggggtctctccatgttgcccagactggtctcgaactcctgaactccagcagtccaccagcattggcctcccaaagtgctgggattatgggcatgagtcactaacttgtcctattacttgttttgtgattgagggtctctgtgttacaggattctctccttagttcagttaaagatgggatccttgtcacatagccatgaaaaattagtcttgcagacaattcaaagggtgaggaaaatgggatttattgggaaaaaagggaaaaaggaagcctccacaaacccagagtccctgctgttcacttcctgccttgcagattgaataccaggttctgcccaggaagaggaggagcctggctcctctctgctgcaaatggctcagacttcctgaggctctaccacagtgcacaccaatcccagtgtgtgggctggtgggggtttgtcgaaaacacctttgtaccagctgtttcatgagaaatgtctttcataggatgatcacaaaaaatgttattttttattgttttttcaatggataaactttatgttgttgagttattgatgatatattgaaatggacttttcattaccagtgaggaaaaagtggcttccctttaccttcctagattatttcattagactacaaattaaatgatcataaaacagattaccaacaaaaaaactatagttaactatgtacatgcacaggagtccaacagaaatatgagattcaatgaaaagccagatgattgatgcttacatagcattctgagctatagagaaatatttgaggcttggggttagtgaaggatggtgaagacaagttataagggtgagggggtggagatgtatggtaaataaatgttgtcttgttctgcagatcaaaaataggtaataaaattgtctcagaggagctatcttcctgtattggacatctgtattaagtacttttactaaagcagtgaagaggcaaggagaaaacttccccttcacccttggaaggctcactgaaaattcaactctcaaaagaaagattaataagagaaaagccatctcatttattaaggtgcacatggagagatccggagtgattacccaaacccctagtggggtatagaagcttatataccaccatgaggttacagatagaatggggactcagagcccaggcaaaaataggttatgttggtaaatcaggttatagcagtaaggcaggttatggatagaagagaagcggaggcttggctagcaaaggtgaccttgtaatgtaaatgaaaccttgcatgtagctgccctcagataaaatagatggcatatatttctttcaggcctttaaagctgtcagactctcagttactctttgctagatccaggaaagggaagtcctggctgcatcaatgcagattgtccacagatgcaaatctctgccacaaaagatagctttgtaaggctacatctgtttgctggctctctgaacagccatctccatgtatgccaaataaccatattttggggtatgatactgttcgggtctgtgtcccaacgcaaatctcatcttgaattgtaatccccacgcgttgagggagggacctggctggaggtgatcaaatcatggtgaggtttcccccatccagttcttgtgatagtgagggagttctcatgagatctgatggcttaaaagtatgtggcagtttcccccttgctgtctgtttttcttcccccttgcgaagaagaaggtgcttgctttctccttcaccttccaccatgattgtaaatttcctgaggcctcccaaggcatgcagaactgtgagtcaattaaaactctcttctttataaataacccaatctcaggcagttctttatagcactgtaaaaacaaactagtacagcataaaatatttttttcttcagtagattttctttatagattacaaaaggacaattttcagagctactccttttctgcagtttctcaggataaccagctgaaaatataccaaaagaatctactttgcagtggcacattctgctctccaacagtcatatgagagttaggctcagatgtatcctgagccctaagagtgccaaatcactggtacaaaccaaaagtaaaattgtaaatcccctcagccatctgcatagaccacctcctctccgtcaagagcattccaaagttaacctgaaaagctagttgaggccatgatgggaatgggaaacaagccatgtctcattatactctcctctgttttggaattgctgatagaacagactctgagtctgataggaaacatttacaatctattctctgaaacctgctacctggaggtttcgtctgcataataaaaccttggtctctacaaccctttaacttaatccagacaattcctttccattgattctgagtctgtataatggcttaactcttcctaccaattgccaatcagaaaatctttgagtctaactgtgacttggaagccagtttcatgcctttctggagtgaaccaatgtggagtacaggagaaggtcagagagactttgcttccgaggcttccatttcctttatttcaaagtactcagcatgcccaagtgccatactttggggtatggttttctgagccctaacaagagtaaaatctgtacatgaggtaacagtgtgctagagacacagtgagaaatagctttgttaatggggtagctatttgaataaggcgtcttttcctaggatctgtcaattctcaaggacagctttaggaaatatgtgtctcctcccaaactaacatggagattttgtgatgtttatgtattttcctgggcaagaagtttttctatttaagtcagttctcaatggattaaatcttcaaactcttaaggccaaacccatttaaattaatagaagagcatctcttttgttggaccagagtgatttttcagctattccaatagtgatatagaggtagtatgtttagacattcctctgggcatgcacagctttctggtaagttcaggcccatcatctaaatatcatacttaaaaacataaatgggccgggcgcggtggctcacgcctgtaatcccagcactttgggaggccgaggtgggcgggacacaaggtcaggagatagagaccatcctggctaacacggtgaaaccccgtctctactaaaaaatacaaaaaattagccgggtgtggtggcaggcacctgtagtcccagctacttgggaggctgaggcaggagaatggtgtgaacctgggaggtggagcttacagtgagccaagatagcatcactgaactccagcctgggcgacagagcaagactccgtctcaaaaaaataaatacataaaataaaataaaaaataaaaaacataaatggaacaaaaatgattttattaaacaggggtcttccatttacattagccaatgttgctttcctcaaattgtgcacaatacccacagtgttgctaagagtgacagagattaatggaatcaaaaattatctctcactcatgcaggtgcaagttagatttcaaattgtatggccatttgctttgttctagggaaaactctttctttagtaatagcattctactttctatggtaattgagctttccaaaagcaaactgcttcttcaattatgtttccatgaatgaaatttttgcagaatatatgaagagttctgtttctttaaacactttaaaacattagtttacttttttatatactgcacaagtgcaatgaaatgaactcattgactattatttaactgtgatgctgaaagctaaaatattgcattgcaagagcttttagtgatcatcatttagcattttaaaggtactaaaagcactattcatccatcaaattgttcatttgtttaaaacacgtgcaacaaaagctgagtgtacctaaaagcacaaaataaatctgctcccttgcactttagttagatgaagcagaatgtgcacaggtaaggtcagtaaaaacacatacacacacgcacaaacacacacacacaaacacagtatgtttgtactccaagaagttcaataacagttgaatgcacattcataacacatctttggaaaacacatgaatatacttttaaatcctgaaacaataaaaaagagaattgtcacaagattggtttggattttagtatcattctattagaagtaaacttcataatcattttaagaactgcaatcatctgttttactttgcatttctttcctttccttgtttccctctgtctgcttctgggctattagagtttctcaaattgtttgtatcacatagatacccacgtaaatgctgcagggttaactccaagacactgttagacacaagtgtgcttgtatttcaattcttgtaattataagtggccccacttcagactattctgttctatgaaacacaacggaaagcatcaaattaggggaaaagagtggctcagactgccccaagcaattaattaaagaaaattactactggatgctttatgcacagcaggggctctgtgcatgaagaaatataactgctagtcacacctgtgctgattctcactgtggaattgaaattatcatgagtaaatgtaattacttagcaaatttaataaatgttgtttggggttctgaaaacagcacttggatctacaaattacacagtgataagtgtggcagcacaagttcagtggtctctaatagcactaaaatatgtagagcatcctggaatgtaccaggaaagcttatgagtaagtaaaggtaataaattgctacaaaaaaatgggtactaagccactcatagttacccatgctttcatgttttcctttgattatgtaattttgacaaagttatttttttcaaaatccccagtagtttagatatccaagcttatcctcctgaaatacaaataagtttattcctaacaaaaaatgagttagtatttggtaacgcttgaaatgaagtgctctaaataagtatttaattaagaataaaacagctattgctcttgggttgtgatgattggcaataattgctttacatgatttaatggttataaaattaacaagagataagtaataaaaataagaaattaagctacatttttcatcataactttaatttgtatgctcttaagaatcataatgatgattggtcttttattaaatgaatattaagatgaaccttcatataatctatattatctttgaagaatatgttaatcattaagtcataatttataattaaaatgcaatacaatttattttgtcaaaaggaaataaagtatttgtgtattttgtaaaattgccatatggtaaaagcctattcagagtataagccttctgctataatactaatagccataagtcttctactttaaatcaagaaaatgttagaaaatgtttaatagctttagtatatttaaacaattcatcaaaattatttaaaattttgctagggctgtcataacaacatgccacaattgggtgatcaaaagtcacagatacatattctctcacagttctggagactacaaatccaaaatcaagctttctgtgggaccatgatctccacaaagactctgggaattaatgcctccttgatcttctcccttctggcgtttgctgtcaaatttcagcattccttgttttgtagacctggcactgaaatctctactttctttatcacatggtcctctcccttgtgtcttcatgtcttcatgtcttcacatcatcttccttctctgtatattcacatcatctttcatctgtgtatgttcctatgtccaaatttctcccttattagggaaaggaatttatctagtatccaatgtcttaagttcaataatggattttgtggctgcactagtttaagatggctatatgtgaacttgattacagctataagaatcctatttccaaataaggttacattcgcaggttctgggtgggcatgagttttcaggggccactaattaaccgagtacaaatataaggtgttaatgttcttgtaagtcgtgtggctgacttctccctgttttgtcagtgccctgcaataaatacaattcccacttagtatgcacctatacacaaaaaagaatatttattatgctctaatggaggaatcagggtcagaacacttattctgtgaccagataatacatattttaggctttgcagaccgcatggtctttgttacaattgctcacccgtgctgtaaacaataggtaaatggattggaatagttggatttggcccccagtcatgattttgcctacctttcctatggtggaaaggaattctttattttgtttaacagagtaaatttaaatatctatatcaaggaaaatctgttctttgaaagcattgtccacaatttttcaaaacccagattttatttttaaagctatttcaagacctaggaaacataatgcattttaaaaatcaaacccatatgaacaattaagcctagagaaaagaaatacatatatttggggtgaattgtaaattcagacacaaagcccttctgagtgtgggaccccatgtgacttcacagatcatatgcccttgacattaattctgtctgaaagtatttttgaaatcttgttctttcaacacactaggtcctactaaatgggatttttataaagtcactagtaataactcacaaatggatcaaatgaataatatattacttaaagtgcctattataatgttttgcacattaagtgttgtcccagtacagaggtttttagatgtatttacacttttaataatataaatatcaagtggtgagtattgccccaatataaggttattttaaatgtgatttattatataattaacaatattactcttataatcatagtaatattttagtcaaatatcaacaaataaggtgctattgctttatgagtgttttgtagaaatagtcaaaagttctagctatgaatcctgaaaagtcaacacttagtgaaaactttggttcactaaaaaattatacaaccaattttgtgaaattactgttgcaagtctcattcatttaagtgtgattaacaaaggaggttaaatttcacatagcataaactttttctgtttttttatttttagtgtgagaactttctctaggaataaaaaaaaaccctcatgttattttcgttttaaatgtataacctttggcacaaaactgagaaaatggctgcttcactagatgtgaaactgcctttcccttgcaagggttaattactaaagaagaaattcaaacttaaacaacaaactctgcaatcttaattaaaaagaaactatcaactggtgactccgggtagtttagagatgacaagtatcaaatatgtggtaaagtgaaatgtaaaaagtaggagaaggtgattataaggcaggtcagcttttagatttgccatagcagagatagaaatactacgactgattttaaaatctgtatgttgaactttacctaatgagttttatgtggaggcagatgaatagagtacagaacacaaaaactacatttgcgtaatggaatatggttctgcttaactggcaagagaaaattattttttaaccattaatgcaaatatctactgtttcattttatgttatctgattattttaaataatgtgtctgagtagcaaatagaaggcttttttccaacaaaagatcattatatcatttcatttttccaattctgtataaatgtccaagttagttttttttgaggtcttgcaaacaaaatagacattcaaatattcagattttaatttttcttaaattaattttgttatttaaacaatgtaaaatcttataccacttgatatatgttgataatccataattccatttgatggcacaataaaaatcacatttgtgttttaaattttaaaaagcaggatttatttttaaactaaaaatttagactctcttagaataaattacacagtctcaaaatactattgcactctgctacaagtgaaaagcaaaattttttttattaaagaagttcaatcttagtgaaataatttacaataacctagtagggatggtgtttaagagattgaagcaacataattcacttgattctgatacatacatacaaaattttctaacagttacttttaaatacattggctctgaaagttcattttaattctttattctgagtataatacttttattacaattttaaacttaattttataaagacttttctgaagtataattttaacccctcatatattttctaaacaattgaacagaatatttatagattgaaattttaggcttaaaacagaccctcttaatattccaatcttttttgagtctaagcccacgttccctgatctaacagataactttaagaaaatgatattaattcatgtcaaacaggatttctgtctttgagagaatcacttactttcctcaaagttatttttgaccatctattgtgcttaatatgagatggttattgagttacttgataaacttgtagtttccatacataaaagtataaccattctgaatatcaaatacttcatgataataaaattataatttacatctatattttactttgtctattcaaaaaatgtttagaaaaagtacatggagactgtagtcagcatattatttcaaaattaatactaatgttaatgtatgttgaatacctgtgatgataataactgtacattctgaaaaaaatgttactatcctgtatctaattgctaagtaaatcactcaccatttttaagcacttattatatgccatgcagtgtgatatgttgtgaaaggatgtataaggtgacacaaggttctatcattaaagacatgaggaataaacttatcacaataaatgatatctaatggcttaaaaaagaaagaaaatattctgactgtgttattagagtttcaggctggggaaacagtcacaatgatgatgactaatagatcatttaggccttaaacataaatagaactttattaagcatatagaggaaggggaaacaaatctatgtaaacgaaatagtatgaagagaagcatagaagataaaaatttaaaaatacaagaaattttaggaaatttttaataaccaacctagaaaacaacttgagattcttccttatttttaatttcatttatacaccatcattaaccttgctgagtcttcctccaaaatgcctcttaattttattacttcatttctatttgtgttacttgctgaataaagtttcacgtcatcatgatcagggattcctgcctaagggtgattttcatgcgtgaaggatatttggcagtgtgtgaagacattttttattatcgcaagtgggggaagagcactagtagtatgtagcaggtagaggccaagtatattggctaaattgtagccaatactaatacactgaagaatatgctaaatattctacaatgcctaggtcaagttcccataacaaagaattatctgtccaaaatgtcaaagtaccaaactagcaataacttcctaactttatctccgccttagaaattcctattcttgattagaaatcatctagtcatgtaatgaatttgatctactataaaatatccaagaagagatatctatgagacagttaaaaatctaatgttaggcatcaacagggaaatcatttttggagatacaaattagtgagaaagtataaaggttcaaaatacagagatggttaacattttctagagaaaatctttaaaaggaaagaaaaaataataagataataaaatatttatatttaaaaggaggatgggctgggcgcggtggctcatgcctgtaatcccagcactttgggaaggaggccgaggcaggcaaatcgcctgaggtcaggagttcaaaaccagtctggccaacatggtgcaaccccatctctactaaaaatacaaaaattagctgggtgtggtggtgcatacctatagtcccagctacttgggagcttgaggcaggagaattgctttaacccagtaggcagaggttgcagtgagccaagaaagaaccactgcactccagcctgggcaagaaagtgagactccatctcaaaaaggaaaaaaaaaaaaacaaacagaagaatgaggatgtatctgccaacaaaatattgaacaaacaactgaaacagaaacattaagaaaggggaagaagagaacatctcttaataaagcacatgggttcagctactgaccacttccatgaatttggctgtcttcaacatgcctttaggattagtaataattccactttttccaaatatatgtttgttatctacacatacattagatattgtttcttatattgttaacccttgtatttattctcatttggtaaagtagtacaaccaacagagaataaaacaagttatttcaaaatgtaaaaatctggggggtcacaggatagaaggcaggagcacatcagtgggcacaaaatcccagatgaataccaaccatttctcagcttttggccccttcaatccactgcatgatgcaccaaggatgttcaggaaagtaaaatagcactctttcatcaatcatttctaaggcatctgtaaaatgctgccgttttcagggaagaggggctttttcccttacctgaaatgaaaatcagcttaacagaaattgagcttaaacatttacccaactcagtaattttggcatttgtgaattacctgatgaatacatacttgtttcttatctagaaattaaaaaatcttacagtggttttgtatggtgaaaaatctatttctatcattgacccaagtattcccagtaaggaaagaaaagcttttattgtattagatcctgcttgcattaaaattatctttaaatattttgacttcatctatttgttaaaactatcaaatagcttacttagcaaaatgaatatttaattcagaaaagaaaataaagcaattactgtgtgtatattcagccatatacgtagaaggtgccaacttaattgcttagaggggaagtctttctttttcattctatggtcacattcccttttaaattcatatgtgtgtatgtgtgtgtgtgtgtctgtgtataatttatatataattgatgtacaaatatatatgacataaatatatataaatatatgttatacataatatataacaatattatttatgacataaatatttgtatttacttatttgtcaaacatttagtgactgtcaacaatatgcaaggtgctaagcatgccactatgttaacaactataaaaaagccaaagaagctttgagcttggaatctgaaaggagagacagaaatcaaagtttatttctgtctacagaattagtttattaaatattaataaatgatgtttgagaaaattataagttgctatgaaagcataaaccacaggatatgacaagtctagagattttgataaagctttgtagggagaatttgaatgaatcaaactaagaatttatgaagattgagctggtaaggaaaagggataaattcattctaggaagaaaaggaacagcagaatgtccttaggaagaagtgagcatgaattatttgctaaaagtggaaaatgctaggaaattacatggagtgcaaattacacacccaagtagagatgtgaaagtgcataggaaaagatgcagcatttaatatgcatttaaagtttattattaatagcttgaaaataaatacatgaatgaatggatgaagaaaagatttagcagaagattatttactatcaagaggagcagaaaatacttattagacaaaagtgaaaaatgcacagaaaattgagttacttgccaaaggtcatctggaaacatcaaggaaagaattaaaacaaagtggaaaagaagcacaagcttatagaaattatgttgagaccagaggctatttatttttaaaattggaacacttttttctgaacttacaatacatttaaattgattggaaatattattcatacacatatctaagtcaaatatataatctacctaatggtttctggcatgtattttcctttcagtcttttcttcagcacataccatgaaaatacatgagatagaagggatttttaaaaagagacctagagattgtggggctacattattcagaataaataaaagcgaaatgaaatctaatttaaaaacatatcacaagatctaacttactgttatatacacaaagtgcattttagtagacaatatacagacaatgtttcttttaaatcaacatttgttgacaatgttatccattatccactattattcttattagttgtgtcttatttttattaatttttttttctattggattttttatgagagatttgtttggttataagattttaaatgtggctattatgtcagaatacatatctcaattcaaatgaaatctttttccaagtttacaatcaactgtgtccttccgtaatttaatttgttgaaaataggaagcatactggtagtacattttagtaattttaaaatcctttagtaaaggaaaaattacattttggctttgagaaatatcatcttcaagaataaaaacactctttcatattcatgtattcatagagcataaggtattcactctatagtacgtttttagatttgcaaatatttttgagtagaacataaaagaaatatctaacttcctaatatcaaggatggtgtgaacatcagaaagctacctttgttatcctaaaacaacttaggttttgttgagaaaatataattaaaaacagtcttattccaatcttgaaaacctctctacagaggtagaagagaaaaaaaaaagcaattttattattgaataagcatgaaaccaggatgtgatgcacatcacaggcaatccactaaagagaatgcagacagaaaggaatctcacccttttatatagccaaacagatgcaacctattgtatacaccttttcattgttgtgagataatcataggatgtaatggacttacacaaaattggatgttcttatagcacagaggctatatggtatagcctattgctcctaggctacaaatctgtacattttaccaattactgtaggcaactataacacaatagtatttgtgtatctaactgtatctaaatatagaaaaagtacatgaaaaatacattataatcttatgagaccgccatcgtaacatgatccattgttgaacaaaatgttgtgatgcagcacatgaatatgtaggccttttagtaattattcaatcttcctaaatagcttttttcagttttgcaactcagtagcatccatggccatcatctaatataaaagtcttggccgggcacagtggctcatgcctgtgatcccagcactttgagaggccgagacgggtggatcatgaggtcaggagttcgagacagcctggccaacatggtgaaaccccgtctctactaaaaatacaaaaattagctgagcgtggtggcaggggcctgtaatcccagctgcttgggaggccgaggcaggagaatcgctggaacctgggaggcagaggttgcagtgaaccgagatcatgccattgcactccaacctgggtgacaagagcaagactctgtcacaaaaaaaagtcttattataaggtacaaactgaaaggcaccgattaaactttgagtgtttaatgtatatagctattattattttaagtcttgaagacaaacctctagcctataggtattttttttcccagcgtgggatctaaaccaatagctctacattataatagtcaacaaaatattcatgagtaacagaaatttagtttcatgtatcaatctatacttaggtgggagagaagttacatcacaaagttaattaagtaacaatagacctgttttttgtggtcgctatcttacaatgccaagtttctatttttctattaactggaatgtttgttttcaattaagccaattaattgtttttgtttgttttacaagtagagcttgtcttagtccattgtgtgttgagatagcagaatactaagatggggtaatttaagaagaaaactttttcttacatttctggagactgggaagtctaaggttgaggagctacatctggagaggtcatcttgccatatcataacatggcagaaagcaccatatggctcagatttctcttccctttcttaaaaggccactaatctcatcacgggggccctattcttatgacatcatctatcactacatcccaaagaccctgcctccaaatagcaacaacacataaatttgggaatttaatttctgacacatggaatttggggacacattcaaaccatagctaggcttgaatacttggatgcatattagttttattttattatcaacaattataaagaagatggtgtcacttttactctgccaataataaaactgttggttatacaattccaggtcctgtttctgctgggaggacaatttgaactaactggaaaggacatcatgagaaccattactgggagtacagaaagaaaaggtcatgtaacaaataagttttgattcctagtaaaatgtgattcttaaagtagtcaaaataatccactggaaataagacagtaagaccatctaaaatgtaatatgtaaatatgttctctagagtacctcttcatctgaattcagtaccaagatcagttactcttgaaaacttaaatttcaaggccttgtgagaaccacagtcaagtcttgcccaggtgctgtctccgtgtgggaagcatgactccagctgagttgtttctcttttgttttggttttggtttttgttttattttgttttaatctctgatagccaaacgagtgatcagcagcactcgaaagccttctttccagcatggtgactgtattttctttctggaatacctttttgtagatgaaatttcctggtccacagagatagccaatttccactggtgtgtccttccagatcctattgtctttaagttttagggtttctagggaagatataaacccttttaggcattggaaatggttagaagaggatttgcttatatcaggcacaggatgtgctcttagacccaaattcatggacctgccaaatgtaggttcaaagagaagattctgtgcttgaatgcagaggcagcaggaaaaagactaatgataaaactctggagattttaacccagtacatagctgaatcttagctaattattttttaaaatttgatttatctactttatttatctggaggactgaggaatataaggtgtatgctacattatggaaatcagcacacgtttgcataaatcctaggcaatggtacagataaaataactttctctgtctgattcaaatactgtggtatcccaaaagttagaactaaggcttttaagagagtgtttaccattgcctgaaaatcagtttttatgttttgtttcttttttttttgaagagggtaaggcctcaggccatccagacatcatacacacagtaaacagacaaagctcttaccttttacatgtagttctatggaactcaactaccaaaaggctcctggtagttactcagagagcatttcctgtggtttcttaggagtagcatgtaaataattctgctgatgaatatcacatctctctaatatgtttgtattaaaaaaatcttttttggtgtgcaggctcagagtctagtgactttaaaaatcattttttcttgagatgatttgttgatgacataagaaccctaaccaagctgggcacggtggctcaagcctgtaatcccagcacttggggaggctgaggtaggtggatcacgaggtcaggagattgagaccatcctggcttccatggtgaaatcccatctctactaaaaatatgaaaaattagccaggcatggtggaagaagccaggaattcaggttctgggactttttaaaattttgacatgtatattgaatattcaagtggaatgcaaataggagttggaaagtcagaaaagtgttctgagatggagatgtaaatatgtgagttactggcttttcaagagtgtttagagcatggtaatgagtgaggtcatcaaaagcagtagcatgaatacacaagagatgtctaaggcctgatacctggaatactccaatgtaaagagcttggggagaagcagagaaactaccaaaggagattgagatagtgttgcaaataaaacagaagaaaaatcaaaagccatgtgatacccagctctaggaagcacaaatggtaattttgtgcaaatcaaaaatgtgtcctttcctcatggcacagtactgccatctgctggaatatgtttctaaaaactgtattaagattataatgcccccaaggtaaatgtccttcagtgcttagctgtaagcagtagagaaagtgtatgaaggtggaggaagtatatcaaatgtttctgatctgtttaaggcttatgagtattgaaaaacaattaatggatttagcaacattaagtatgtggtgacgttgacaaatgtcggtttgaagtcatgaaaatgaaagtttagttactgttgagtttaaaagaaaatgaaaaaaaattgtacacattattttcattttcttttaaacctacagtaactaaacttccattttcatgacttcaaaatgacatttgttatggtcaccaaataatctgtacaacaaacccccatgacacaagtttacctatataacaaactgcacatatgtccctgaacttaaaataaaagttaaaaaaaagaaataactgtagatagtgacaatggaccattctatcaagaaattttgttggaataagaggcagagaaataggttagtctgtagttgacatggaagttgcttcaaggaagtagggtggaaaaattggtaatgaaggagaaataagaaaaattaagaccacagcagtctgtagtagatgagagagaataagatctaaggcactaatgaaggaattgtctgtagagagacagaaatatatagttcatgcacaggagatggtgaaaaacagagtatgtgagtagtggctctaggtgggcagatatggtaattagagtccatagacactttcttcttttcacagtatagtaagaagcaaggtcagcaaaagcaagtagggatgaaaaaggagatgtgagagctctctggctagcatcttctcactttactattgctatgggaactgggagaatctcaaaagtatttacatacttcttggagaatacatttttctgatgaatatttatagcaccagcctaaacaaatattatttagtagaacatgcttgtttttaataatcttctttcctcacagtgttatctgttctactcatgtattgccaagtgaccatttcatctgaatattacccaacaggtttgcatccttctctgaccttggacagtggcatgtgtttctaacctggttttcttctccattaatgaaacacattattatttaatttccaaactctgtcaaataaatgtgtgaaaatatattcatgtgataaaaataatcactgataatttgtaatacatttgtagaagtgtgacttgtacctcatttgtgtgctgacgtctagtgcagatctcagagtcaggccaactctccattgtcctcactatcctacttgtcttagtctgttttctgatggttataacaaaatattttgtactgggtaacttagattgacaatacatttatttctaacagttatggggactgagcattccaaggttaagggctacatcttgtgagggctttcttgctgatgggaactctgtacggacttctgagccagcacagggaatcacatgatgaaaatgccacatatgataacatgcggtgctcaagtctctctccctcttctgataaaaacaccagtttctttcccatgaaaaccaattaattaattaactatttaaatacaccaaactatgaatgggctatttcatgaggccagagccctcttaaaggcctcatgtctcaatactgccacgttagggattacatttcaacatgagatttggaggggaccaaccattgcacttcacttccccattttgtgaccaaggccttcagactacaaagtagctatttaattctatgtttttgacattgtcccatgcctgccttttagtcgaagaggtatagtttccatggtttcaaacaatactaacagtcccaactatcttttctttataagatcaatatggaaaatttgatgaaataaatgaaaaaaactgtatatatactaaactactatgagctagttaatacagaatttcttgtctccattgttgatgggggtgactaaaatttgagttgagtttctgcctaatttcaacttttattcttgaatgggggatttccccatttttgaatactactatattcaagaagccaagcacaagaaatatttaaggataataatggctattttcttgcccaaagtggatattttgcatctctaggttttcaaactaatttatattgctcttaccaacttgttgcctgtaatcatattttccatattgatagtgagaatctttatctcattccctgcctttaaagataacttttattatagattttgttactgtttacaggatagaatgttactttaattcttagttttcaaagagtttttattaaaaccaagtattgaacttttgcttatctattacactagccatatatttttctactttagttaactactttggtgcattgaaaaaatacattttataatgcgtagtcaactttacagtcctgaaataaactgataattatgtcataattttattaatataccctgggtttgggctaaccactggttcatttaatggctttaacattttcatctgcctcactttgagtccaagataaaactggcctacggtattatatttctactttctttgttcaataatgttacaaatgttaccctaacctcataaaaacattaaaagaaattttagtatcatcaagtggtgagagaatttttgttttctatttcctcttactaattgtttccaagatacctggcttctctgtaaggctagtttaaaatgttacacttcttacagaattctagctctagataggccataattacataaataacagaggatgaaaatcccttcaaaggatgaaacatagaaattgatgtagtaaagctttaggctgtccaagataatgttttctatttaaaatattgcaaatctggccaattgaattaaattcactttgaacaggctataataagcacttacttttggtgtgagtaaataacaaataaatcacttaagaaaatacggcattattccccctcatggtgcatttaaactagaataaaaaattgttacgagaggaagatgaagtcaccaaaagagctgagaattgttaaagaatgtcaggcagaatactcataaggttgaactgataacataattaggtacttgctaaaaacttaccaagatacaacctgggcaataacaccctctagaatggcaaccagactatatagagtgttaaaaagaagaatcttggtaaaaatgaggctagcaattaaaaatgagaaaactaaggataaacagaaagggttctagaaacaattcaggaagagatatttgaaaggcatgtggtatgataaagttcaagtgacataaaattaatagtaatatcatgaagcaaaaagcagaaatggaaagatatagaacgaaaggggataatcacttgaatcacaagattatatatttgagttcagtacactgaaatatttcatttttcaatatgaaagacatatagtgacctctaggcactcattttaatatacaagagccattaaaaaggcacttcaaggtgttagcaggatctactccattataaccatggatgggaggtttgcattcactctgaaaagagtttcctttgcagttttatgtgagaaaaatacagtatcaaaatgattatattgtgatacagaatctccctattaaccaattgcaatgacccaaatatgaccccacaagaaatgaatctggtgcatataactaacgagatgggtgaaattgttcatcctgtaaaattgatggtcagtcactgaagagaagaatttgggactgcatttcaggaaaaagaaccaaaacagtaacagttctgcttctacataattatacggatcctcatgagtcacctgtgaagaaaacaaaacaaaacctcttctcaaaattctgtccactaatttctaaggaaaaaaatgtggtagataggaaacatgatactgctagagcacagagatgcagataatgaatgagaaatctttctctaaattaagatttttaaacattgattttgctatttgaatataggaagatgactcctgttttctcatttgatatatttaatggtgagttcacagatacaattgtttcctcggcttaaggtcaatgatcatggtggaataggaaaatagagaaaaatgctgaaagttttcagctttagtgtactatctgttaaaaagagtatttcaaagacactgtttttacactgttttaatgaattcagactatgtctcatgatcttttggaaaattgaaataatctcaaattattttcctgagtacaaaatgtcaatttaatgagagtttaaatgtgatgacccaattatttcaattaaattatacaatatttattagactataagttgcaaactgctatcatataactatgaattgcagaagatagaagaggatgaaataatacataagaccataaaattaattatatcattctctctttcatagaaacagacaatatatgctcattataatatttgatgacttagctatcataatcagttctatgttttcacaatactgtttatcctgttataaacctaaattccgtttgatcaattatcggtctcagagcaagggaatcagtcttgcatgtattaattgaagcttatggtatgaagtacagcccaaagattaattttgcaagaaatataactataaaccagattctgacacctctatacaacacattaacacatctttgtcataagcacgattcaagacaacaccactttagaactttagttctctgctgttgaaggttgggagattttgtaaaaattttttacaaagataatctagtcatttcaaaaatctgccataagagaaagattttaagtttgaaagaagtcagaactatagttaatgatactgtattgtttacttgaaatttgctaagagggtagccttaagtgtaacactatgttatacgcatgtacaagtgagtcttaaaacaaacactcatgattttacttgtagcaactttgatttgctctctttacaaccaaacttcttgaaagtgattttgactcccagttttcaattcctcatttaatattattttaagtcataacacattacttcatttaaagccctcctagtcatactcctaattgttcttgtctctaccaggcacttgacatttatccaaccattcagttattaaacaaatattttttcagtgcttgacctgctgcctattgctgggatatgtcctggaaatccaacagtggatgcttctattgttttgtctacctccgtaaatagctctgcttctgttggtctccagcaatgctgtccaatctcaaccagttagttatgcagaaaatgttgtaaaactcatgtgccagcattatctttatttttgcctcaaaaacagagcctattgacaataagagtaaaatgtttcagttcagaggcaagaattatacaagtgaacattttgaagtaatgacaatgagtgactataacaaaatttagagacttataaaggaaactacgtgatgcccaggtgctgaaacaccattcatagtggagaaatcaaagtcacgccatgtgtgttttacaaatcattaacacattcagaataaatgcttgaaaatatgaatagcttagagaggaaagagtttttctgtcctacttacttacctatctgataacttgtgaaaatggctgcttcaacctgtatgcacattcagtgtaacatttccaaaacctatactttctctaatatcaccgagccatgtcaggtgaaaatacacgtaatttctgtagctattgttttgtgctaactttacagaattttttcagtcaaccaacagtattacattacttagtagtgcccttgtctcagagccagttaatcataaacattccgacaggttgaaccatctaacaatggaatggattctcatgtgttttctgcacactcgctccccaattatgttctatgagaagatccagaagagactcccttcactaagggattaagaaacatatgggtaaggggagattttccatcagtgaaagttctctggttgctcacttctgtgggccagatatgactataaaagaggccacaattgagaaatgctcacagatttcaataagaatgatgtgattccagaaaatcacatgcaacattgtagcacttaaccaccaaacaaaatgtgggcatacctacaatcaaggctggcagagttgtacaggtcatcagagtgtcttggaccaagaaaacttgggcaggggctaaatgatattgacatccttagaacaaaatagagaccctttcagaatattgcttaattcatatgacaagaaattcttcaggtctggagccaaaaacttgactccagtcaccactgtggagatatagcctcccaccaagttttatgttaattttctgattcagagccctttgattaaatagggtgcctggagggctctgcactattgacgcaccactcacagtaaatctttccccatgccttccccaaagagacctgtggccttctttatagcatatctactctgtgaagcaattcactgtgaatagcttttcctggcacctgagaagtttacctagactactcttcttcatggatttcatagtctgggactactggtcacatctttctttccagaatactttcctattttttgttgttgttgctgtttgttgttttgagacagggcctcattctgtcccccaggctggagggcagtgacacaatctccactcactgcaacctccacctcccaggctcaaacgattctcccacctcagcctcctgagtagctgagaccacaggtgtgtgccaccgtgcccagctgatttttatatttttgtagagacaaggttttgccatgttgctcaggctggtcttaattagagggctcaagtgatctgcctgccttagcctcccaaagggatgggattacagatgtgagccaccatgcccgatctgcttttccatttggattcatggaatagcctctcctgattctacttctatatttttagctactttgtattattggagcataatatagacacagaaattgtcctaaattatgagagtgtaggtcaatgagtttctcaaatagaacaacctcatataatcactacattgatcaacaaatagggcagcccccacaccttagatatcatcattttgacctcttccagttagtaaccatctaggtttgtcattaccttgacttctaacactatgaattagtttcgtctgattttgagcttaatataaatgtatcatactgtatgcattcttttatgtatggcttcttttgctcagcatgataaatctaatgtttggaagattgcttcaatgttacatatcattatagtaacattcattttcttacctcttttgtatgagtaaacacaaattatccattctacttttgatgaacatttgagttgtttcccaaatattactgtattataatgaaaactgttatgaacattatgtacaagtctttggagaacatattatacacttctgttgtttgattcactcattaaatattatttttaccagtgttctgaaattggtcctctttggtgatcacgcatcacttttgttactacttatttctttaaaatttctacaaacacatctgtctgctgagaacttctgaacttttaacaggtacttccagtacttaatatttaattatttttcttctttaattttcctttctatattaccttcttagattaatgtgtgcaagacacacggtagagttacttaaagtattgcctttttcttatttggtaatgaaatgtgtcaattctacttaattaacaaccctatacttaatgatcttctgccacggtcttagtttctgccttcatcttatttgaaagtgtttgtaaaactaattttctgatagcaatgctgatgtctagtgatttagagtagttgggttgttaaaaattagttactgcattccaagataaaagttgttattatcacaaactctttgagcaatccttattgtagcagtgcacgagagaatgaagtgaatatcaactgagaaactggaaaataataagcaataaaatgcttgaaaagaaaaaaaaaaaagaaaacagtttttgtgaatgtttggcaggtgaatcccctgaggaatgaatgccttggtatttgtgactccacataaatcaaacggacataaaaagagatctcaattttggcacaaacaaattgatctgactggatggtggctgataaaatgcatctttaccccaagttcaaaaagatcttggctgatcaaggcagcaattcagaagataataaagtctggagagacttgaacaagttttgtggagtttatataaaaggaagactgagagggaaatgtcaaaatattgaggagtacaataccatgatcattataaacattacattactgaaggttgcatatatggatatatgcaaatgatatgaaagggatgaaaccttttcataaaaatataaaaaatcaacattcattttcactggtaatttattctaagccttatttctaatgatgctgtgtgtgtgtgtgtgtgtgtgtgtgtgtgtgtttctaggattaaataaatatgtgcctttcttctgggattaaatcttttcactcattttctcgttgctgctttgattgtgtccaaacatcttatgacagagatttggcttttgctttatttctaaatgcttctcattagcacctaggttcctgctgtatcaaactttaaatgtttgaaatactatatataattttagttttcttggccttggctcatatggtttaattttcctggaatagttttaccttacttgaccatttggaaaattcctattcttttctaagattccggtcctggatctcagtatttttgaaagcttctcttgaccttcataagcaaacctgtgttgttacttcttcttgtgtcatttttttcataatatacagccttggctcttcacctttagcatttacaaaaattgccattattttttaaatggactttctagccccaatgctaaatttgctcacaataatttttagaataaattcaaaaatatactaagaagattcttatacaaaaagtttgagtatcttactctgagaacactgttccatagctattatcacttttcacattaatattttctaacagtctttgttttccttaagggaaggaaaggataacatttattttcctagcacctgttatagggatagacaagtagtattaatttaataattgataatttttgtttattatacacttatgtggaacttaatgtaggtctgtacaattgtaagctttttataagtattaaactgattaagtctcattattaacctgtgaaggtgctactcttattccttgttttcaggtgagtaaactcaacagacaagttactaacttgcctaatttcaggcagttagaaaggcagctctaattaaaatataagaaatatgatttcaaattaaaggaatttatccacttcataacactctggaatgttgatttttaaaatatgtattgtagtataacactgacatatgtaccaacatcaaatgtacaggctgaaaaattatccaaaagtcagcacagcattataaagatgactcatgtgaagtaataaaatctgagctgaatcctaggaaattccttctttcccctacacagtagtaactctccctctcaccattatcctcacatctgttcatactttacagttatttatttcactcaacatgcagtttgtgtgtaaacaacacattgtacttatttattccatatttgatatctatttttccagtttggatctaatataaattatgtttctagaaagattattatacatatctttaggaggaagtatatgtacacatttatgtatttctatatacacactatatatacacacactgtatatatgaatacatacacacaaacatgcaaacacctgtatgcatatatagtcaggatggatttgggcaatgaggtcgaaaggatacgttcattacgttcattacaagattaagtcgaatgtttttcagagtcgtagtgatttacattcccttcatcagtgcgtgcaaatttcgtttgtgcagcttctatagaaaccctaaatacactttattttttaaagtttagctttttagtaattatagagtagaatttatttttatttttaatttgtatttaataaaagtagcttgatttccttttatttttttctttctttaattttttttttaattctgtgtggtaaagtgctttgaaaaggcctttcttgatgtttcatttggttgtacttttatttcttatttattaatttttttttttttggagatggttctaactctgtcacccaggctggagtgcagtggttgattagagctcactgcatccttgacctccccgactcaaaagagcctagctactcaggagtagctgggactacaggccagagccaccatgcctggctaattttttaaattttttgtataggcagagttctctcactatgttgcccagacaggtctcagatccctgggctcaagtagtcctcccactttgccctcccaaagtgctgggattaatgttgtgagccaccgtacctgaccatgttttttttttcaaaaaattcatttgtgaagtttaaaaagtatcttttaagagttcttactgtatttatattgcaaatttcattacccattctgttgctagccttttcactctcagtgagttattttatgattacaaatccttgtttatgttattttattactattaacttatttatcttatttattagccttcagtggttagttttttagtctttttttaaatcttaaggtcatagaagtgccctctatattactttttaaaaactgtactgttttatgttacacattggcttctatatgaaataatttttgtgtatgttgtgaagttggatgttaatattcatttttctctatggatttatgaaagacagcacaatttattgaaaatacatcttttccttgctgtactgaagcactatttttttcacaaatcagctaaatatattgttgtgtggttctctttatgagttctccattctgtttcattgaaatatctatacttgcaccttttccataatgtcataattaatatacatttataaaaactttaataaagtcttcacattatattttttcttcaaagttatttatgcactgcgtttttatttgcattttacagtcagtttttcagttgccgccaaatataatgcagacaaattacactattactaatcacagtattgtgattttcagtgtattacaaatatagatttatttaaaatactgactctttcttctaatactaggaataacaaagaaacatggtacatctttatttctgttgaatgtctttaatttctcttaatctttcacaattttcagtaaagggattgaatataatatgttatattttatattaggaattcaatgtttcttcctggaaacatttcagatttttaatattttacttgatttagactcactacatttggaaagcttcaattacaattttacttttaacagatatagagctactcagatttgctattcttgtgtcactatttacgattttttagaaatgtcttctatttcatcaaattatttcacaatttttgacttaaagttacttattacattctctttttctctctcgtgactatagaatctataatgatttcctcattattcatgatatttagaatttgtggatattcttttttaatttcatgcataatcatggtatatttttatcagtcttttcatagtaactttggcttttgctgatttcatttattttatgattgtttctttttctcctgcttcttatttatattctcttttttaattctttggatttaatttgacattacatttaaaatttttgagattgacgattacattattaattttcaaactttatttttttaacatatttatgtaaccatatatttatctccaagctgaggtttgcctaagtctcccaacttttaacaagcagtatttttactttcatttttattaaattcaaaatatattttaatgttcactgtaattacttttttgatccatgaataacttagaaatgtgatgcttaatttccaaacatttgttaactttcaaagtcttgctatagatttccagcttaataacattgttgtacaaaaaacactgtcaaagatttcaaatttttggtatttattgattcttgcttggggcctaacctcagcctctatctatctatctatctatctatctatctatctatctatctatctacctatctatcatctatcatctatctacctagacagagatatctatagatatctatggtaaattttgaaacatgttccaaatacactataataaattgtatgttttgctgtttttgagtgcagtttttatgtcaaagtatttaattctactgctttaaatgtttgtattattgatattttgtatcctttttgctatcatgtatcaaaaatgtgtattaaagtctttatgattgaagatgtgcctattgctccttttagttctataaattatgcatgcgcattaactgtgtgtgcgtgaatataaatacacaagttagacaacttcctcaataattgattcttttatgtgaatgatgtatacatcttcctctcaggtaataatttctgccttaaaatctctattgtctaatattaacatagctaaacaaattttcatttggcttgtgtttatcttttatatacatatatgaaatttttaaatttagatggttccatagatagaagatagaagatatatagatagaagatagtatatgtcttctacagatacagatatgtatatgtatatatacttatagatatattaatatttatatctatgtttataaatgtatatatgtagatagctatatatgtatatctacatatatatctacataccaatatatatctctaggtgtgtatatgatatctatatacatatagatatagatatgcaggtatatacatacatagataactatgtatatatatctatgcacatgtagaaatatagatgtagatataaatatatatctgtatagagttatgtgtagacatatatagatatatagataggtctatatagagaaccatctacctatatctagatagatatctatcaattgatatctctacctatctagctctagatagattatctaatctatctataaaactatcttgaaacgatcctaatttaaaaatcaagattcgttttaattcaaaaatcttaacttaaaagttaggaaccatctttattttgtggttcatatacaccatggaatactaggtggccataaaaaagagtgagatcaagtcatttgcaggaacatggagggagctggatggaggtcttcatccttagcaaactaatgcaagaacagaaaaccaaatactgcatgttctcatttacaagtgggagctaaattatgagaacacatgaacacatagagggaagcaacaggcactggggtctctgggagtgtggagggtgggaggaagttgaagatcaggaaaaacaactaatgggtactaggcttaatagctgggtggtgaaataatgtgcacaacaaacctctgtgacactagtttgccacataacaaacctacacaggtgccattgaactgaaaataaaagttaaaaatgatgaaaatacggaaacaaaaatcttcaaccaacacaaaacggttcatcccaagaatcatcttaatttaaaaatctttacatcttaagaagctacacgggaggctgaggcaggagaatcgcttgaacctgggaggcaacggttgcagtgaggcaagatcgcgccattgcactccagtccaagtgagagtgtgagactcagtctcaaaaaaataaaatgaaataaagagcaactttgatcttaaatagagtatatatccgtttacatttaatgtggtgaatgaaaaatttggttttcatttaccaccctacaatttgcctttctcaactaatactttatagataaaaggacttacggaaagcaaatatatgactcaatattccaataaaagtgcttgaaataatttatattgagcacgttatccttctttcttaaaaaccttaagctatacacattacatagataagcactgatgagaatctagtactaaataaccattatttcaaaggcatagatagaatgctttccaggtatggagtgtttccatacttcccttccatacattttcaagccattgcataacaaatacggaattttgtggagaggagtgaatttatatcctttaatattttctcactttagaaatgcagtcttggaatgatataaactctgtaaacagactatcatgttgtatttacgaagaattatattaaggtgtctatttttaagacaagaataaatatgtttttgttctaataatagaaatggataagcagaattctggcttataataatgagaacatactatcccctagtttgaaataagttaaataatttaactttctcatgttatcttgaagtttgtattgaatgtatcagtgcactacatgaaatgggacatttggtgctgtcaggcctctgagcccaagctaagccatcatatcccctgtgacctgtaggtacacatccaaatggcctgttcctgccttaactgatgacattccaccacaaaaggagtgaaaatggctggcccttgccttaagtgatgacattccaccacaaaataagtgaaaatggctggtccttgccttaactgatgacattaccttgtgaaatcccttttccgggctcatcctgactcaaaaagctcccccactgagcaccttgtgaccccccatgcctgcctgccagagaacaagccgcctttgactgtaattttcctttacctacccaaatcttataaaacagccccacccctatctcccttcgctgattctctttttggactcatcccgcctgcacccaggtgattaaaaagctttattgctcacacagagcctgttttgtggtctcttcacatggacgcgcgtgaaagttaccatcccttttatcctacacataaaatgattcagtggtttaaaacacttctttccatatcctgcagttttgcatagcaaaagaaacatgcactttgaggaaaatgtaccttttaattttttgtattttaaatattatgggtacaaaatatttgtatgtaattatggagtacatgtgatgtttcaatacctcctttttgatcccagatcttccctgaaatttttgtccaatttgtattgcattatttaagtttgagaaggagtaatgatgtttagtatatactgttataaaataactgattccaaagatgtaaagtatctgatacttactatgtccaaatataatttttaaggaaatgttcctaacgatgtgtaaataataacatggaataaaataaattcatataactttatgataataattttacttaaattaaaaagtgttatgtgcaaacagatggtatacgacgcgtggcatgcaataatgcaattgagtccaattaaatatattgtttgatttatttccacaatctgataaatgtattgtagaccaaaacatcaaaaaccataagtagggctgggcgcggtggctcaagcctgtaatcccaacactttggccaaggcaggcagatcatgaggtcaggagattgagaccatcgtggctaagatggtgaaaccccgtcgatacgaaaaatacaaaaaaattagccggacgtcgtggtgggcgcctgtagtcccagctaatcaagaggctgaggcagaagaatggcgtgaaccccggaggcggagcttgcagtgagcggagatggcgccactgcactccagcctgggcgacacagcgagactccgtctcaaaacaaacaaacaaacaaacaaacaaaccataagtagcctgtataatgtctttttattcgctgccatgtttttaatataaatatataagagcatcttaaattatttaaataagtcaattattttataagtgaatttagtattagaacatatatattcttttgcacaggaagcttttttaagtgtcagaaattatatacttatatagagacttttgttcacaaagtagttagttgtaggtacatacaacatacttgaaaaatatttttgtcgacattggatgcatttttctcttatagactcttaaaaatgttaacaagccaacatgtgaatatactgaagtattttttaatcttttctagtgtcgataacgagttggttgatataaagtcattagagtggcaattcaacaaatattttctatcgcataacaaatgtcattaacttgctagtctgtcatgctgttgcaaagataaagccacattcattagtgttttttgttgttgtttcttattggtgctttgtttgttttgtaacatgaagtggcccacttcttgtattaaattatttattctttctgaaaatgttcaatcagaatgtaataaaacctttgaaaaatgatttaaaaatttattcctgtaggtgggaaattgaacaggtgagaacacttagacacagggcagggaacatcacacccctgggcctgtcgtggggtgggggcagagaggcagggatagcattaggagaaatacctaatgtaaatgaggagttagcgggtgcagcaaaccaacatggcacatttatacctatgtaacaaacctgcacgttgtgcacgtgtgccctagaacttaaagtacaataaaaaatatatatttatttctactgaacaaaatgtccatatattagatggcctaggactggtaggggtctctaatccaggggattgttgataaactgagacaacttctataatttttacattgttactcttaaagtcttgtcattgtctgactgtctcaatattggaaaataacgtcaatattcagtgtaataaaccagaagaaaaatgggccgatatcccattcaattaaagacattgaaaagaatgtgtatgtattacttttactcacatcttaatgctcatcgtgttgtcaccaagccagatagaaccatatactggggaatgtaatgtttatctgagaaaccaaatgcctaaatacaaattttaatagtatgaagtaagaggaaataaatatgggggattttctagtcttctccattagatataaattgcaagatttggccactttaaaaaatattaatatttactaatttttcatcaattcaaatatcatatcatagagagcaatttaatcaaattagataacagttctaaatataaaatttaactgtatatctcccagaaaccaaaaaatgagaaattatctgtggcttttggctagacaaaggtttcttagatgtggcccaaagaacaacctagagaacaagcaaaaaaaccaattacaacaacagtaaatatgacttcataaaaacaaaaaattctatatttctagcctaaatgactcaaacttgtaatagacatttccaaattatgtctgataaaggatgtgtatccaaaatatgtaaactcaattttaaggcaaattacagtccaataataaacaataaggaaaagaatatatttgaacacatactttgccagaggaaattcagagacagcaaataatcacatcgaaagatgttcaatatctttagccattggagaaatacaaattaaatgagatgccattccacacctactagaataaatataattaaaaatactcatcatcttgtgtgttggtgatgatttaaaaaatctgtagctctcaaatactgatggtaggaaagtaaatgatacagccactctggagaaaaaaatggattgtttcttacaaagttaaatagacacccactattttacctacttactctactgttgttctttaagcagaaaacagtagagcatattatacatataagaatgtgtttacaagtgtccatggcaaacttatttataataagactaaactgtcaacaacccaaagtttatcaatgggtgaataaataaatccaacacggtatactcataacatgagatataacttcacacacacataaaaccatattttcagcaaatggtgctggaacaattggacatccacatccaaaaaaagaatctagacactgtgtttacacaatatacaagaatggataatagatttaaatataaaaatgcgagactatagaagaatattataaattgaattttatataagttagtacttctgctctaggaaagacatagtttatatttaaaaaacaagccaagactgggagacaatatttacaaaacatgtatccaatgaagaactggtatgagcaccccacagaactcttaaaactcaaaaagaaaaaaagttaaataatccagttaaaaagtgggcaggagatctgaacagacatttcaccaagggaaacatattaatggcaaataagtaaatgaaatatgctcaacatcatatattgttagagaactgctcattagaacaagataccaccacatgcctactaaaatggctaaaatccaaatcactgacaacactaaattgtgttgaggataaagagcaagggaaacttattgattgcttgtgggaatgcaaaatggcacaaccacgttagaagatagttttgcatttcttacaaagttaaatgtagtcttaccacatggaccagtaacttcacccctatccaaatgagtcaaaaatctttctacacaaaaatgtcacatgactccttaaaacagcttttctcgtaacaaaacttggtagctactaagatgcccccaacaggtgagtgatggctcaataaactggcatatctataaaatgggatattcagtgttaaaagaataagctatcaagccatacaaaatatgcaagaacctagagtacatataactaagtgaaagaagctaatctgaagaggctgtacactgtatcattccaatgatgtaacattcttaaaaaggggaaaatctataaaaagatcagaatttccagtagtctccaagggaaaggatgaataaatcaagcacagaaatttttaagaaagtaaaactattcttataataccatagtagtgggtacatgacatatgcacttgtcccagcccatgaaatgtataatgccaagagtgaaccctaatataaaactaatatatggactttcatttataataatatgtcaatacggatgcatcagttataacaaaggcaccacactaatgcaagatactaatcataaagaatatggagggtagaagaaagtgtttggaaattctctgtgctttgttagttttttctataaacctaaaattgttctcaaaataaaatctattaatttaaaaaagaatgaactattgttaccagtatcaacataggtgaaagtcagagtagttatgttgagtgcaaaagacagacaaaaaagaatagattttgtgtgattacatttacataaaattctaccaagtgtaaaccattctgtagtatcagaaatagattagtagttgcatggagattaagtagggaagaggggaagaagccattactaaagacacaaagcaactttggggaaatgaatatgttcattatcttgatcgccatggtgttttcttatgtaccaatatgccaaaactttaaaaataatatacactggattatgttcagtttatgtcaattacacttcaatgaaaaacatttaaaaatattatgtatcttgattttatatttattcagagatattattattctctacctgccatatatgccttttggcagtgtaaagatatataaacatagtatgtaaatatggtatttgtaatattcttattcatatgcaaagatagtttacatttaatttttttaacttttcttctatttttattctgtatcctccagacattaacattgagaacttcatatactattacatatttaaaaatgagtcatgtccagtataatacaaaatttcagcaatgtgacatgacaggaacaaaatataaatgaagttgctttatatagattcattttgctcattaaaacatttcatagaataaatcacttattcaaaagtattaacatatatatttaagagtgcactatgaaaaaacagaatcaagaaatggataccagattgatactcactaaatcgtatgttaaagcattttgaataattttgtagtttttcaaaagtaactcacacatgtcacatattaataatgtatatatttatttttaggaactccttttagataactattaggtatatagttttatgctgagttttatgagaactagaaaaagcatatcattttatgtcagaaatagtatattggttcctaggtcattttctatagctgtcaaaatgtttcaatgtcttttaaaactcaagaaaatgaggaagaaatacagaaatattcctaggttaattgtttttatatccttatctagttctttctattcttaattatattaattcttcccaatggcttatttaaaaatgggtcttcaattgtctttcattaaaattctatggggtctcattacctgtaaaaaggttttatttcacacgaagtattttttggttatgtaaaaggaaactaaagctctgggctaaataaataacttttttaaattttccctattgggaagtagttgaatatatacattgctgtattcagctaaaacatattagaatgtgcttttatttacaataaaaatgaaataaggctgcgttacattggcaagctgtaatgggaaatgtatttgtcaccctaggcaaactgaaaaggcaggtatattgaattcagtaatgctgagtaattaagccttcacttacaacccttatattagataattcaacttaataagttaagtcattttccaagtgtttgttaatgtatcaaaaggatttatacatttcacaaacggggactcaagctaaggtaaagatttataaacacaaccaattcactagagaaagaattttaagcttgtttttcttgtttttccaaacctaactctttcatggaaaaaaataaaggcaatattataaaacagatgaaagtgcaggtaattaccttaagtgacattgagaagcctagagctcacctggtccacactatttgataagccatgtcacccctcatttacttccacggttcccttcaagattgaagagctgtctgaataccacagtcttagtatattatatttttgtaaggaaacctgctcactcaagaacatcttctgtgagagccaatccattcagcatgttaggaagtttccttccatgtatgattcaggcccacctgatccagtggattggacaatgaatgaacacttgatttaggtggaagttatccatttattgattagaaatcagtaagcctctttcacttgagaattccaattgagatgaagaatataataggtatgcatactggatgagcaaagccaaatagcctccgtaatgttataaagaataatattgagccacaggcaagcagtggagatacaaagagtacaagagtaagggaacaaatgttgccctggagtgagagaaattgataaaaagccactgccttgatgttggacaggttcttagttctatgttcagcctttattttctgctcttggattctacactgtacatttcaagtttatttacaaatggttttgactacagaaaaagcaagtgtgccattatgtaatttttgacgtattttgggagaaataaagtaaaaagtattttttccttttcttttatttatttttatatttatttatttatttattttttgagattgagtttctctcttgctgcccaggctggagtgcagtggcgtgatcttggctcactgcaacctccgtcccccaggttcaggtgattctcctgcctcagcctcctgagtagctgggaatacaggcgtgtgccaccatgcccagctagtttttgtatttttaatagagttggggtttcaccttgttggccaggctggtctcgaactccagatctcaggtgatccacccaccttggtctcccaaagtgtttggattacaggcgtgagttactgcacccagccacaaaaagtattgagagtttttcaaagtagtttctgagttacatgtaaaaacaagataaaaaaatttactaacagctctgcagctttcaaaattaagcagtcagatttctatgtggctgagaatttctagcagtctcctccattagaatttgccatgcccaaaatgtcctatgctgtacagttaaatgattgatgtttaagtaatattcagtttgaaagctgactttaaatgtttccttgaggggaaaacatgcttagcatttcattataaaattatccaagctttgctctcatttctatgttcaaattcaatgcatgagttaaagcatcttaagacttccttttaagcaatttatatatttgccctaagatttcaactagtcctaatatcagaggatcacttcattggaaaagttgtgcaaaagtaaaatgaaatggagattaactactaaattgtcatgttgagattcgtgataaatttagttacaatgatattattcaaattggaattaactgcaactttcctaggtatgtaaatgaaagtggagtgaaattgctatataaacctagggttatgaccatcaaaatacatgatatagcaatacaataatttaatgttgactcagggagtaataaatcagatatttcattcaacaagctgtgattttttaattataacttaagaattataagttaacatttataagtattgtttcttaataatgagttgacaaaaataatagttgaaaaatacaattatatagcatgattatattgtgaaaatttacattaaaaattaaaataatgaataaatcacctttggaaactactgttatttaaaatatcaggagtccagaaaattgcaacttattttgatctacataatcatttttacatgaaaatttaattccaaaaccattgcaaagattattttcttaataaccatagtattaagaatcagtttctgtgaaagtacaatagaatacaaacatatcctagatgtattgttttctgcatttatgcaagaacaataagattttttaaatgtttgacttatctgtggaaatatgatagagacaattgtatgatttggtttaaggattactcatttctgtacttagatgaggtaattttttcttttctagataaactctaattccacttttttcatacagtacacacctatacatgcatatataagtttccgttaaacaacagtagtaagatttgaacagattatttacctacctttctgaaaagtgtctgttaacattgttataagcctataagggaagaaagggactatattacaaaagaacagaaatgatccaggagagtatgaacacaactggattctaagaatactgggctattgggtatcgggatgtagattgggataaaagattatacccctatcagaacactgtcagtttcactattgatgtggtacaaacacatgataggatggtttgcagcatcaaggaaaaagtgatggcctcaggtgaggttgcaatgtcaaatttcccatggaagctgacagaagatgcacacgtcacaaagaaaataacatgtagaatacttaaaatctactctcaataatttttaagttattttaaattatatactattgttattaactatagtcactattgccatagtcgctataactacagtcactatagatctattacataatgtacaatagatctctgaaatttacttctcctgtcaatttaaattttgtttcctttgactaacattgagatagcaatttttatcacaatttaaaaattataataacataaaacaatataattttacagcaaggaaaaggcatttcttgaaagttaattcacaacattgaatgaattgctaaacaaaacattgtcaagaaccaaaacaactctagatatctcaggcagaatgaattcaaagaaaatgactgtgcatattatttctcaacattagattcacaatggaatcacctggggcaattttttaaagaaacaaatgcctaaatatcatatccagattctaatttatttgttattagatatggtctggaatcactctactcctgacgtccctgctcaagaatcaacttccaggaagagagactgggactcactgattttggtgctattcagttgaactatgcccctactgattttccacctgctggttctattcattatagatagggagatgttaacatctccaattataatagtagatttatctgtctgttcttgcagttctatctgttttcacctcatgtgttattgacagcccgttacatgcaaacacattaaggattgttatgttttcttggaaaattaaaccctttgtgactatgtaatatcgcttttgtatccccctataattattcttgctctgaagtctttttgttggaaattaatatattaatccagctttcttttaattagtattatcatgttatatatttttcaaagttaactctcaagcttgtccacaatgcgcttccagaaattaatcaactacatgttaaagttttctgctccattactaacatctatgggggctcctgggcttttgctccactatgctacaattctttgcatttccccatctctctaattaagtggagatttagggtgggggcagcagtttgttctgtggcctcagtcccctaacggatttaaaatgagttgttgatactctgtttatacagcatttttcttgtaaggatgggagtgatgacttccaagtttcttacatgcttgaataactgacattttttactatattctcacccctatggtggtagaaaaatgctataatttttggatccacagaactaaagtactaggagaggggttttttcacaggaaagatggttgctactgaaaaaaaaaagaaaaaaaaaagataaagtcttctctgctatctctgctagattctctaaactctcttcctgtctctggagtccagacacacaagcctccttttagttttgagctttcactatgcttttatcttaaaaactttgcctactatgtcctttctgctgagaaagcaccttatcccctcaattacctagttaacatcaaatatcaaatcatacttcttactgaaggccaagtaccacctctagaagttttccctaagaacagcctacatacacttaattctgtgagcccttttcttatatcctttgaatgctcttccttcacattactcttccttcacagcctttagccaggcaatatattacaggaaaacagggagaacataatttttgccatttactcttacctttgcctagcccagtgcctggcaaacaatagattctcattatgtattttttttgaatgaattaataaatccaagtaaaataattgatgttttggaattatctaagactgttaaaatcagttaaatatagttaatgtgaagcaaaaaacagtaaacaaaattaatgtaatatacatgctgatgttattttagaaaaaacacaataatttacaaattcctttcaataattcaattaacttttatgagatttgattgaagacaaatctatgaatgctttgttgtaaataaaaggtaatccttgtaataagcaaaaataaattaacataacaaatatcaatttacagatagatgaaaagtgattgttttctagatgaaaggaagattattaatagttggcataagaaatcaaaaattagttcaacaattagtcatacggaaatgttgaatattgacattaatgtgataaagaaaacgagagtttctgcaaataacctcccatatctgatgtgaatctttcacgtcattctatagttcaactagttcttaataactcaaaaacaagaaggataaaatccatcattttgtttggctacccagatccctcctgtagctgtcatacagagtgtgatttatgagttgtaagttgtgctgtggagcttgacaagtaagtttgatttcatttagtatcttctttaaaccatcttagatcttctctttgacaagaatttatgttagtgttctcaaaatgtaaaatgggtaacttaatgagaacaaaagttgtaccctaagatatatttgcattatctacatactcacaattaaatcttaacagttcaaatatacccatttgtaatagaatctaacagttttcctcttgaattttttgacaccagaaatttttggtcccaataatgtttagcttcctagtcacaaaccaaacagaaagcaaatttcatcagcttagaatggttaaaaccaacacagctgcaatatttttatttttgttttaaaattttgtttagtcaaatatagttttaagatgagtagaaattctcctgaagataataaagaaaaagtatgtcatataatatcttaaataaaaataataatagttattaattttttctgctcattatgttccagaatctgtactaagcattttagaggattattttatttaattcacacaataatcccttgagaaatatataattattatctttaattcacagttattgaaaatgagacacaaagaggttaagaattttgtccaaggtcaggcagctaatgtgacttagcaagggtgtaattaagaaaaaataagtctttcttatcttatgggaaatttggaaaagcaaatatctaggttctctttttaattaaaaaatataaaatgtaaaatgtgagtctctcttaaagcagggaatcaactttaattaaattgaaacaatacagaatcttttgttattcaggctctatattattattatctctgctgatagcaaaagctaagaatagaaaatatttctgacccaagttggtaaattatgaatcaacctgctagataatcagaataggctaacaagtggaattaaatgtaattattctatattaaatataatataaacaatttcttattataattttactaagattctaccagttgcaactgaaatataacattttaaatccaagcttaataaaagaacttggcatgagatgttttcataggaaatagtgacaattcatattatttttaagtgtaaatgagatgtattatttctgtatttcattttccttctaaaagttatttttaaagttttagtttttctgaagttgatagctattactaactcttttgggcaaagttttttgagatagattaatttatataattaggaagaaactaaagtagttgtgaaagtttctaaaaagataataaagtagttgtctttatgttataatagaaaatgagaatgtgaacgcagatcattttgactctcagagtttgtgttttcagcaaatattacctgaatattgatatataaattagaattccccaaaggaaaacatttaaaaatgttaaaattaataaaatcattagcttatatacttgtccttagtatcaggacattctccagtggattcaatagagcatctgcagttttattttttgaacaaaggtttctgcaatatagactcatggtgtgagcttactgggtcatgttctttgttccttcttggagctttgggaggcatttataaaagagctgctgtagtagaaggactgagttgtatcaccctgaggatttaagtttctgcgggagaatcaaattcactttagtatagggatttagtaggtttccctagccttattaacaaaatatcatggactggattattaacaaaatactaatacgacatgaaaagtgcatactttgtcttacaataatccagttaagacactatttttgtatagcaaaattctttactacacactagttacaaatcaagtgagcaagaggtggtcatactgctctgcttcctattcctgccctttcctcctaccccagctgaaaatacttgctgcaaatgtccttttataggagactttgaccccagggtgtagaaagggaaaggaaaaggtcagaaatatatgtcttgtctataacttaaatctaataccagcacaaaagcctgaaaggactgatttttagagagcgttggcaggaaactgctctgctatcatctgttttaagctacttttatacattatttttttcggcttctactctgctactattcaactgcaatttgttttattgtacacttcaacaccatgaacagtatcttagttattattgaaatgtattacaagttcataaagaaaacagcattttgtttcttcagtcatctactttggatgaaagtgttatttagaaaagactaaatgggaaaaataatacattaaaaataaaaattgcatattaattttttagatcaaataaaccaattttcagcattttcatggacctttataaccaaaataaataaacatttaaagacagatgatttaattcagtattttgtttcttgaaaatactggaatatgtgttttagataatgtatatatttctgttattgaaaagttttcaatagtcagctgacttcatatgcaactttttgcaaataataataccattttaaacttattcaaggattttaggtgttcttaaatattattttataacttattttactcccctaaagtaaatatttatggcatctgtaagccattgtacaattggtatagcatagtattaggattgtcctttgtaatattttatagtattcacatttgtatttaatcgcaaatttgatataatttagccaagccttcaatacatttataaagagagcactactgagactttatacaatggaataaaataacaaaatgtgatggcagcattcttccactcaaagagatatatatattttttattctatccaatttttaactaattttattttttgcacccaatggaggggaaaattactaaaagtgtgattaaggctattataagatacataaactgtatgacacaagcattctcaactcaactttacacttcacattgtttatgaacttagtatgccagctttttaagtgtggtggggtctggtattccacacttatatgtctctgaatcccacccttgtgctgatgctaagatgaactgaagcagggatgaatttttctcttacatggaaacatgaatatattccaaactggagggagctctcacaagcagttcgcctacggtaattactttgtgccttgtaatgggtcacacagtatcctcaaaaaggtgtgtctgagtcctagaccctctcccctcccagtacctgtaaatgtcaccttattttgaaataggagctttacagataaaataaagttaaagatctcagggtgagatcatccggaatttagagtgagtcatggatatttgggacacagaaacacaagcaaggtcatgtgaagatagagacaaaggttacagttatgctgtcacaagccaaggagtaccaggaaccacccggaactagaagaggcagggaaggattcttccctagagccatcagaagaagtacggtcctgagtacgcctggattttggtctttttgcctctataagtgagagatattattattattactattattattattattgtaacaattttaagccacaagttttgtagcaatttcttttggcagcactaggaaactagttaatgcctctattatttggttaaacaaagaacactattaagtatttttaaaacaatgtatatgaatgttgattatggtaagcaaacagtttataatcagatcagtttctatgtaaaatttcatgttattatattgattttgttttgttttaaccatacaagacttgcttggatgtggtaccattgaataccatccccattccctcctgtcccacaactttttgaaatttatggggctttgttctagactgaatatttcttttccctcaaatttcatatgttaaagccctaccccacaatgtgacagtattgggaagtgaggtctttgagaattaattaggtttagacaaagtcatgagcttaggaccctcatcaatggaattagtgtccttataagaacaggaagtctatagagtgctctctctctctctctctctctctctgtgtctctctctctctctgtccatctgctacgtgaggaaaaagcaagctgggaagaagacctcacgaggaaacaaatttgccagcaccttaatcttgcactttccagcttctaaaattctgagaaataaatgtctgttgtgtaagccatccagtccatgacattctgttatagaatcctggactgactgatatgggctggaacatgctggagagatggtacaaaatctaattttagaaaaatattttaagttgtaagatctgaggcaaaaatcagttaaatattaccatttacattaaccaaattactccatttgcagtatcaaattaaggaaatttatgttttattcaagcttttaaaatcagcacacccactttgcagaagtaattaataacccatgattattaattatgtttgccaatttaattttcatccagtattacttgcagggaaagtttgaaatagataaatcatcttccttttgagatgtcacttgtatcactaaaggctacctataatttctgtaattgttactctttaatgcaactttaaacttcgaagaaagatgtttcaatatttttttttggtttttgttttttcttttcttttttgttcattttgtttgataatgtatctttttatattattattatactttaagttttagggtacatgtgcacaatgtgaaggttagttacatatgtatacatgtgccatgctggtgtgctgcacccattaactcgtcatttagcattaggtgtatctcctaatgctatccctctcccctccccccaccccacaacagtccccagagtgtgatgttctccttcctgtgtccatgtgttctcattgttcaattcccacctatgagtgagaacatgcggtgtttggttttttgtccttgcgatagtttactggcaatgatgatttccaatttcatccatgtccctacaaaggacatgaactcatcattttttatggctgcatagtattccatggtgtatatgtgacacattttcttaatccagtctatcattgttggacatttgggttggttccaagtatttgctattgtgaatagtgccacaataaacatacgtgtgcatgtgtctttatagcagcatgatttatagtcctttgggtatatacccagtaatgggatggctgggtcaaatggtatttctagttctatatccctgaggaatcgccacactgacttccacaatggtcgaactagtttacagtcccactaatagtgtaaaagtgttcctatttctccacatcctctccagcacctgttgtttcctgactttttaatgatcgccattgtaactggtgtgagatggtatctcattgtggttttgatttgcatttctctgatgcccagtgatggtgagcattttttcatgtgttttttggctgcataaatatcttcctttgagaagtgtctgttcatgtcctttgcccactttttgatggggttgtttgtttttttcttgtaaatttgtttgagttaattgtagattctggatattagccctttgtcagatgagtaggttgggaaatttttctcccattttgtaggttgcctgttcactctgatgggttgctgtgcagaagctctttagtttaattagatcccatttgtcaattttggcttattgttaaattgacttaaatgactaagactgtagcttaaatgaatgagattgtggtggagaggatattccccaaactaactctgtctctgacatttaggggtttgttgtaatagtaacaccttgctagcaatcatctactagtgatttgctcatggaacatgctggagagaaggagtgtctgagtcctagaccctctcccatcccagtacttgtaaatgtcaccttattttgaaataggagctttacagatataataaagttaaagatctcagggtgagatcatcctgaattaagattgagtcatggatatgaatatatgcatatatatatatatattgcatgcatgtggaggcaggttgtatataatataatatgtatatatattacatatgtatagtgtgtgtgtgtgtatatatatatatatgtgtgtgtgtgtgtgtgtgtgtgtgtgtattatatacaccctgcctccacatgcatggcctccctcattatcagtatcctcccctagagtggtacaactgtcaaaattgacttgcctacattaacacaatgttgtcacccagtggtaaatatacataacataaaagatataatttaatcattttaaattctaaaactcagtgatattgaatacattcacaatgttgtgtaattaacactgttttcataacttttatatcacatcaaacagaaattctgtaccattaagcaataattctccattccccttgccccagcctccatgccctagaaacaagcaatctgcattccccctgcatgaatttgactattcgtgatctttcatataagtagaatcatgtactatttgtccttttgtatctggcttattttatttagcataatgttttcaagatttatccatgttgtaaacatgtatcagaacgtcattccctttttatggctaaataatattcccttgtgtgtacatgccacattttgtttatccacacatacaggtttgttttcactttttgactcttgtgaataagaatgagtgatggtatctggcatgtgcaggcagccactttcttgctaaagaccaatagcatcaagcactctactaatggttgtaatttatctgattaggatccagatttccaaaaatgttaattcttattttttccagttcaatggcagttttcatggaggtattgacttctaaaacttcctattccaatcttctgaaatccactttaaaagagtggtttaaattctgtgtttgtaggatgaaattgataaaaaaatattttaacaactttcaaaattgcattacagagataatgtctttggctattgggtgttcacatatttggtatgttataaacaactttctggaaggtaaaggccttttatctcacacttaatattaagacaggaaccattgtcctagcaatagcttttggatttgatgtgatatatttgtatgtaatgagtttttaaaagttagagtgaaaagtcacctcatacaaaacaaaataatttttactgttataagaaagtagttattaattacttataaaacatgcaagtatctttgtgatatttggtgatttatttttctccagtcatcttgtgttgttcttagtggagaaaaaaatatgggtgctctttgtctatgacaatgtgaaaagtaagtatatggtttccctaaaaattcttctaagtttttaatcctctaaaatgatcattgatatgtaaaaataaatattaataatagcaacttaaggatcatttttgctgttatcagaaattgaaaatactgtaacagtccatcaataaatggttatgtatattatgatatatagcatacatagcgtatgtccatatatagaatatgtaagaaatgtatacaacaaagcacaatgaatacacgattatactaagatggatgggcatggatccacgtattattctgtttgtacatggtcttttccaaaaagaaataaaatgtaagaaagaagaaaaaaataaagagaaagagaataaaggcaactaaataaaatataaaccaggatgtgtaagtggtctcatcttaggactggaacaccagtaaagcctctcttctctggaaaaagtttatgtctctgaagttttctcagtgcatcacaactgacagcagcaggaatgtgtttttgctaacagcaatagaaaagcaaaactgtctcaagattgtaatattaatccaaaggttaaaacttcttaccttagtgttgctgctttctctatgcacatcccaaaggacctaggaaggtggaaaggacataggagatggaaaatgtagaaaataaaaaaataaggtaaatttaaaaggtaataagactaacatccattcattcacattaagctcctaattgtaacacattctctggtagacactgcggatatagcagtgaaaaaaaaaagaaaaaaaaatatgcctttttggagcttatattctcttggaaggagatattatatagcttaattacttttgttattatatatgttaagtgttgataagtgctatggaggaaagcaaggcagacaaagcaatcaggcaggagaaagaaagaaagggtattcaattaggaaaagaggaagtcaaattggccctgtttgcagatgacatgattgtatatctagaaaaccccattgtctcagcccaaaatctccttaagctgataagcaacttcagcaaagtctcaggataaaaaatcaatgtgcaaaaatcacaaacattcttatacaccaacaacagacaaacagagagccaaatcatgagtgaactcccattcacaattgcctcaaagagaataaaatacctaggaatccaacttacaagggatgtgaaggacctcttcaaggagaactacaaaccactgctcaacaaaataaaagaggacacaaacaaatggaagaacattccatgttcatggataggaagaatcaatatcgtgaaaatggctatactgtccaaggtaatttatagatttaatgctatccccatcaagctaccaatgcctttcttcacagaattggaaaaaactactttaaagttcatatggaaccaaaaaagagcccgcattgcctagtcaatcctaagccagaagaacaaaactggaggcatcatgctacctgacttcaaactatactacaaggctacagtaaccaaaacagcatggtactggtaccaaaacagagatatagaatactggaacagaacagagccctcagaagtaataccacacatctacaaccatctgatctttgacatacctgacaaaaacaggaaatggggaaaggagtccctatttaataaatggtgctgggaaaactggctagccttatgtagaaagctgaaactggatcccttccttacactttatacaaaaattaattcaagatggattaaaggcttaaatgttagacctaaaactataaaaaccctagaagaaaacctaggcaataccattcaggacataggcatgggcaaagacttcacatctaaaacaccaaaagcaatggcaacaaaagccaaaattgacaaatgggatctaattaaactgaagaacttctgcacagcaaaagaaactaccatcagagtgaacgggcaacctacagaatgctagcaaatttttgcaatctactcatctgacaaagggctaatatccagaatctacaaagaactcaaacaaatttacaagaaaaaaacaaccccataaaaaagtgggcaaaagttatgaacagatgcttcacaaaagaagacatttatacagccaacagacacttgaaaaaatgctcatcatcactggccatcagagaaatgcaaatcaaaaccacagttagataccatctcacaccagttagaatggcgatcattaaaaagtcaggaaacaacatgtgctggggaggatgtggagaaataggaacacttttacactgttggtgggactggaaactagttcaaccattgtggaagacagtgtgatgattcttcaaggatatagaactagaaatatcatttgacccagccatcccattactgggcatatacccaaaggattataaatcatgctgccataaagacacatgcacacgtatgtttattgcagcactattcacaatagcaaagacttggaaccaagccaaatgtccaacaatgatagactggattaagaaaatgtgtcacatatacaccatggaatactatgcagccataaaaaaggatgagttcatgtcctttgtagggacatggatgaagctggaaaccatcattctcagcaaactatcgcaaggacaagaaaaccaaacactgcatgttctcactcataggtgagaattgaacaatgagaacacttggacacaggaaggggaacatcacacctggggcatgttgtagggtgaagggagaggggagggatagcattacgagatacacctaatgtaaatgacgagttaatgggtgcagcacaccaacatgacacatgtatacataggtacgaaacctgcacattgtgcacatgtaccctagaacttaaagtataattaaaaaataaataaataataaataatttaaaaaaattaaaagaaacaaaacaacaacaaaaaacaaagcaaataacatgaggaggagatacaattttaagtagggaataaaggatggcatgacagagacagtagcatatgagtgaaaagcttgaaagaggtgatatggtttgactgggtcccccactaaatctaaagcttgaattgtagttcctgtaatccccatgtgtcatgggagggacctggtgggggttaatttaatcacggggtcagttacccccatgctgctgttcttgtggtatgagtgagttcttatgctctctggtggttttatcagggtctttttccccattttgcttggcacttctccttgctgccaccacgtgaagaaggatgtgttgcttccccttatcatggttataactttcctgaggtctcaccagctgtgcagaactgtgactcaattaaacctctttcctttataaattacccagtctaggatatgtttttattaacagcatgagaaggaactaatacagaaggtaagaaagcaatccaggggggatttgaagacaggtgttttcagtcacagaaaccatgtaaaaagcatctaatgtgagagtgctataatctgaatgttgacagccccccaaattcatacattgaaatctaattcacagtatgatactattaaaagctaaggtctttggaaggtgattatgtcatgaatacagagccttcatgaaggagattggtgcctttataaaagatgcctgaggggttggtttgtcccttccaccatatgatgactccaccatatgaagaagatgggtctatgaactaggaaatagggcctcatcatatatggaatatgtgagcacattgatctgggacttagcttccagaactgtgaagaataaatttatgtcctttataagctacttactatatgatattttgttatagctgctcaaatggactaacacagagacaattcccagcctgcccaaagagcatcaggaagtgttgggtacagtaaagctggaacagagccacgaggggaagagcaacagggctgtgatcaaagaggtgtgcctggtggggagcatgagtagagctgtataatctgtacaataatgacccagagtggaattagaagtccttaaaagtgggtgagcagagtggcatgatctctattatattatgttatattcttgcttggatattgagaatagactgaaggtgagggctaatgcagaagcaggaagggagataaaaattcagaggagacatgatgttggcttagcctgggtggataacagcagtagtaaaaattatttaaatgttttgaaggtaggtttgctgagaagtaattttggaggtacattaccaagactaaatttatattttataaaatgaacaaatttaaggtgtataccttaactttatatatttatgcactcatattcacaccacccatattaagataaagaacagaaactcttctggtgctttattccgcagaaaaccttctggtgctttattccagtcaataacaaacactggtcaaaggatattctactatgaccatagttttcttttgcctctcgctaaacttagtttgtctggagtcatacagattttaagcttttgtgtctgacctattttactcaacatgatgttttggagatacatccatgctgatttatgtgtctattttattttttattgctatgtattattactctgtaagtcaatatcataatttgtttatctcttctcctctttatagatgttacatccagtttttgcctacaaagaaaaacaaactgctatgaataaatttatatctgtctctatcgtgtgaatacacaccctcatttatttttggaatatacctattaattgaattatgatgtcattgggtatgtgcgcagtttaactttataagaaatagccaaacttatttaaaatgtagctatacaatttactttcccaccacaaatgtatgagattttctttgtttcataacctcttcagaattgctatattcagttcccaattttttttcttaagagatggggtctcgctctgtcacacaggctggagtggagtggcataatcatagctcactgcagccttgaactcctgggctcaagctatcctcccatattggtctccaggtatttagccattttaattttaccagttctcttggacatgtaatcacatctcattcaggcttttattttaatttttctgatgaccaactgtgttcaacacatttttttatcctgatcacccacttggctgtcttcttttataaactgactgttcaagtcttttgcccacttttaattgagtgatttatcttttgcataacaatttataggatttgtttactctccaaagaaatcttttgtcaggtctatgtatttcaaatatgttatctcactgtgacatttctattcatttttaattgggataaaaacataacttgtgatctatccttttaataaggttttaaatgtaaaatatagtactgttaagtataggcatgatgttgtacagaaaatctctggaacttatgcaacttacacaactgaaattttatacccattgaacagcaacccttcttcctccttcccctaaccattctactctctatttctatgagtttgacttttttatttttattttttttgagacggagtctcgctttgttgcccaggctggagtgcaatggcgcaatttcggctcactccaagttccacctcccaggttcacgccattctcccctcagcctcccgagtagctgggactacaggcacccgccaccacgcctggctaattttgtgtatttttagtagagacgggggtttcaccatgtttgccaggatggtctcgatctcctgaccttgtgatccgcccgcctcggcctcccaaagtgctgggattacaggcttgagccaccgctcccggctgagtttgactattttagaaagctcatagaagtgaaatcatgcagaatttgtccttctgtgactgacttaccatgctgacatgatatcctccaggtttatccatgttgttgcaaatggcaaaatgtacttcttaaaattgaaaatattccattgtatttatacaccacattgtctttatccattcatgcagtaatggacatttaagtttttaaattttgttttttgtgagtaatgctgcaaagaacaggggtatgcaggtacctgtaccacatcctgatttccattcttttggacatatgcccaagagtaagatggggggtcatatagtagttttaattttagtgtttttgaggaacctccatactgttattcacagtgactgaaccaatttacatcccaatttacagagagtgtacaaggattccagtttctccccatcactgctaacacttgttatgtcttgttttgttttataacggctctcctaatgggtgtgaagtgatatcatattgtggctttcattcgtatttctctgatcattagggatgttgaacatattttcatataccttttggctatttgtatgtctttgaagaaaatttattcaatcattttgcccccctttttattttttctgttgttgaaggagttccttatatatgtaatgaggtttttagaataaatgaatataagtttaatatagtaaaaacattaatacaatttttatttttatgtttaatacattctgtgctccagaaaaaaatatcattgtttatctcacccaagatcattatgatgttcctcaaagttttcttctagaagctttagcattcatgcttaggtgtgtgatccatcttacattgaattttgtggatgatatgagtaagatattaagattaatgaaaatgttaattataataggttctcaggtcctagccaaaggttttgtatattaggatctcttgagatctaggttatttaaaggtaatagacaataagtattaatgaatttgttttctttatctatctggtggttcttaaactttgttgcatattagaatcaagtggtttgcttgcttgctttgttttgtcttgcttttaatagcactgccccaatcataccttcaaaaattctaatttgataacctggacatcaggatttttggaggaggaggggacagggtctcactctgtcacctaggctagtgtacagtggcatgatcatatcccacttcagcctcgaactcctgggcttgagggacccttctgcctcagcctctcacgtagcttgaattacaggtgttgagccaccatgcctggtgacattgggattttaatgggtctctgggtgagtgaatataaagtcatgtttaggaatcattgacaagctccagaagcctggaaaaatgtattcatgaagacagaggttagtgttactgtctccttggatgaaaacacctgacaagatttaggtatttatttattgatttattgatttatttattgggaaacaacattggaagcagtttctgatctgcctctttaatcccttggccaatgcaatcttgagttctttgtagtctcaccattaagtcttgtagggagaatacatctttacttcaagttttcatgcactttatcttcatcttggagaattattatttgaaaaaaagttctcaatatataactcatattaagtaaaatatgtataatacattgcaataattcaacaaatattgcttgtgatgttgtacttactttacacttgtgaaaaatgtaagcaaaatttttaaatagtattacattattttcatagaagaatcacagtaaaataagaactctacaagtccatattttactaagttgcattatttgaaaagcaaactaattttgaagtatctgatgatttcaaaacacagttcactattatttaattagaggatttgaaatataatttttaacattgacttagatactttcctgaaatctattagacataaaagtaaatggtatttatacatttgtttgtaagatgctatgattttaaatttaaaagtctatgtagctttttctgaaggaagctgttctacaattgtagaagcaattttggggcatttctcttacttgattgacttttttcttatccagatgctaccaattttcaagcttgcacaaagtccacttctatgagggaactcagcctacaaggctgtcatgtacatcagtaacatctatatctttatagtaccacatacgccttgccttatcaaatgaaattatataccacgaagtcaggatcgtatctcaactgttctgtaaactccacaatgcatagcatagtgtcactcatgggaaaaatgaaatacttgtgattgaaatggattaacattcttctcatgttaaggaacgtacttcttttattgtacctgttgttatgcagggtgtaagatttattattttctccagaattgatatcaataattaaaaatatataaaaattgaagataaatggggaaacgaacaatttatgaaggtcaaaactatgaagtaaatttcagttcatggatatttggtagaaatactaggttggagagtatggttcacatttgagaccaaattaaatattatttaatagatttctttcatacttagttgaaggaaagcatgtaataaaaacctagcttgaccaaaaacctgacttgctcttggcaaaaattgtggtgtagagagagagaaagagagagagaaggaagtaagaaaattaataacctctactctgtgggaaagtcgttccattccaaatgacacaaatagagaatctgatgaatccgagcctaagaaagtcgaaaaggaagcagattggtatctaatcattgaagacaataaacctgaacactaaaaagacatgactaaataaatgtcaggttctgaacaattaaactggttacttctcttacattgaagtaaagagagactggaaatttctgcctcaactctccctatcaactcaataccttagagtcgaacatagtgttccaaataaaaatataatgaggcagaagatgacaccttgtttactaaattttctagttcatattgaatagttccatctgagcttgaaagccaaggtcttggggaaccatttttaatgtgcttttcaaagagctcatattaaaataattactttatatgtaattagcaaataattagatatgaggctcacaaaggaaatatttatgttcatataatatggctaatgtatggtaacaatagtattaaatctatagatctatgatgggagaattactagaaaaacaatagtgggtctcccaatccatgagcatggaatgattttccatttgcttagatgattagttttcagcatacaaatcttacacacattttgctacatttatttccaagggtttatttttatagtattgtgaatataattatttcttaatttttttttaagagagaaagtgtcttgctctatctacctggctggagtgcagcatcttgcaatcatagctcactgcaaccttgaactactgggctcaagcaactctcctgcctcagtctcctgagtacctaggactgaggtgaatgccaccaagcctagctaattaaaaataaataaatacatttgtaaagaagatctctgtttgttgcgcaggctggttttgaactcctagcctcaagtaatcctcctgacttgacctcccaaggcactgggattacaggcctgagctctttagcccagccacttccatttcctgatggttttatcaatgtattcttcattgtattgactataatctccagtgcaatattggatagaattggtgagagtgaacattataaacatctttggcatgtcgccaattttgaggggaaaacatccagtctttcaccattagatgtgctgtaaaacacagtgtttttggtgattgttgttgctgatgtcctctatcaggttgaagaaattccattctatttttttattcatgttagattctgtcaaatcattttcctgcatcattgagataatcgtttcattttagttctttattttacaacataatatattacattatttactttttaaatactaaaacaatcctgcatttctgggattaatttcacttagttatggagtgcaatcatttgtatacatggttgaatttagtttgataatattttattggagattttcgtgtctatatttgtgaggtatactgatctgtaattttatttttattttttcttttttaaaatttctttttctttcttctttcatttttgcttttgaatataggccttataacatcaattgggaagtttttctctttctctattttctgagtatgagtatcatttcttcattgactatgtgaaataatttaccagtgaagtcatgtggtcctgtatattctcttatggaagacttttaattgttaattcaacatatttattcagattttctattcatgtttgtttcagctgtggtaatttatacatttttaagactttctaccataaatataagttgtataatttgtggtcacaaagtatttaatagtatttcccttataattcatacatttggacaggatgggggagaattggcagtagtaacctttgttcctgattttggtaatcaacactttatctcttatttcttttcttttttgagacagagttttgccgttgtcacccaggctggagtgcaaaggcaggatctgggttcactgtaacctctgcctcctgggttcaagcgattctccttcctcagcctcctgagtagctgggattacaggtgcccaccaccacgcccggctaatttttgtaatttttggagatggggtttcaccatgttggccaggctagtcacgaactgctggcctcaagtgatccatctgccatggcctcccaaagtgttgggattacaggtgtgagccaccatgcctggtcttttttattattcatcatctaaatatttctcaattttgtttaacttttcaaagatttagattttggatcattaaatttctttgttttttgttttcttttttctgttatttttttttagcataacatttttatttaaaaaataactattttccacaagaacaaaagtgtagcgagaggagtggtgataaaggttacatcctggcgagtctctctaaggtctggctagcagaggattgctgacttctcatacctgcttctgcattcaccctgctgctaccacacccttatgtagtctctggaaaactccactgtgttcttgtgacagaatgacagtaaaaatggcaaaaacatttattaaggactgaattctatcccccacaccacccaccgaaatttatacactgaagtcctaacccctggtgtgactctatttggagtgaagatttaaggctaatgaggtcataagagtggaatcctggttccatacaattaatgtccttataagaagagacactggagagcttctctctgccatgtgaggccacagcaggaagacagccatccacaggccaggaagagagccctcactaggacctacaacgggcaaacacctcgatttggaacttccctgcctccacaattgtgagaaatcaatgactcgtttaagccttttttttttaataggatttgagattggttatattaaggtaacaatggaaacatgaatacaaaattaatccacacataggaaaaaggaataatacataaaccactgaggttgctaataataatgatgcctgtttccaaggcaagtgaatacattatgagaccactgaagtgacttttagttaccttgcttagtgcctctgtctttttttttcctttattattattattattatacttttaacttttagggtacatgtgcacactgtgcaggttagttacatatgtatacatgtgacatgctggtgcgctgcacccactaactcgtcatctagcattaggtatatctcccagtgctatccctcccccctacccccaccccacaacagtccccagagtgtgatattccccttcctgtgtccatgtgatctcattgttcaattcccacctatgagtgagaatatgcggtgtttggttttttgttcttgcgatagtttactgagaatgatgatttccaattacatccaagtccctacaaaggacatgaactcatcattttttatggctgcatagtattccatggtgtatatgtgacacattttcttaatccagtctatcattgttggacatttgggttggttccaagtgtttgctatcgtgaataatgccgcaataaacatatgtgtgcatgtgtctttatagcagcatgacttatagtcctttgggtatatacccagtaatgggatggctgggtcaaatggtatttccagtactagatccctgaggaatcgccaaactgacttccacaatggttgaactagtttatagtcccaccaacagtgtaaaagtgttcctatttctccacatcctctccagcacctgttgtttcctgactttgtaatgattgccattctaactggtgtgagatggtatctcattgtgcttttgatttgcatttctctgatggccagtgatgatgagcattttttcatgtgttttttggctgcataaatgtcttcttttgagaagtgtctgttcatgtccttcgcccactttttgatggggttgtttgtttttttcttgtaaatttgtttgagttcattgtagattctggatattagccctttgtcagatgagtaggttgcgaaaattttctcccattttgtaggtttcctgttcactctgatggtagtttcttttgctgtgcagaagctctttagtttaattagatcccatttgtcaattttgtcttttgttcccattgcttttggtgttttatacatgaagtccttgcccatgcctatgtcctcaatggtaatgcctaggttttcttctagggtttttatggttttaggtctaacgtttaagtctttaatccatctggaattgatttttgtataaggtgtaaggaagggatccagtttcagctttctacatatggctagccatttttccctgcaccatttattaaatagggaatcctttcccattgcttgtttttgtcaggtttgtcaaagatcagatagttgtagatatgcggtgttatttctgagggctctgttctgttccattgatctgtatctctgttttggtaccagtaccatgctgttttggttactgtagccttgtactttagtttgaagtcaggtagtgtgatgtctccagctttgttcttttggcttaggattgacttggcgatgcgggctcttttttggttccatatgaactttaaagtagttttttccaattctgtgaagaaagtcattggtagcttgatggggatggcattgaatctgtaaattaccttggacagtatggccattttcacgatattgattcttcctacccatgagcatggaatgttatcccatttgtttgtatcctcttttatttccttgagcagtggtttgtagttctccatgaagaggtccttcacatcccttgtaagttggattcctaggtattttattctctttgaagcaattgtgaatgggatttcactcatgatttggctctctgtttgtctgttattggtgtataagaaggcttgtgatttttgcacattgattttgtatcctgagactttgctgaatttgcttatcagcttaaggagattttgggctgagacaatggggttttctagatatacaatcatgtcatctgcaaacagggacaatttgacttcctcttttcctaactgaatacactttatttccttctcctgcctaattgccctggccagaacttccaacactatgttgaataggagtggtgagagagggcatccctgtcttgtgccagttttcaaagggaatgcttccagtttttgcccattcagtatgatattggctgtgggtttgtcatagatggcttttattattttgaaatatgccccatcaatacctaatttattgagagtttttagcatgaagggttgttgaattttgtcaaaggctttttctgcatctattgagataatcatgtggtttttgtctttggctctgtttatatgctggattacatttattgatttgcatatattgaaccagccttgcatcccagggatgaagcccacttgaccacggtggataagctttttgatgtgctgctggattcgttttgccagtatgttattgaggatttttgcatcaatgttcatcaaggatattgatctaaaattctcttttttggttgtgtctctgcctggctttggtatcagaatgatgctggcctcataaaacgagttagggaggattccctctttttctattgattggaatactttcagaaggaatggtaccagttcctccttgtacctctgttagaattcggctgtgaatccatctggtcctggactctttttgttggtaagctattaattattgccacaatttcagatcctgttattggtctattcagagattcaattcttcctggtttagtcttgggacagtgtatatgtcgaggaatttatccatttcttctagattttctagtttatttgcatagaggtgtttgtagtattctctgatggtagtttgtatttctgtgggatcggtggtgatatctcctttatcattttttattgcgtctatttgattcttctctctttttttctttattagtcttgctagcggtctatcaattttgttgatcctttcaaaaaaccagctcctggattcattaattttttgaaaggtttttttttgtgtctctatttccttcagttctgctctgattttagttatttcttgccttctgctagcttttgaatgtgtttactcttgcttttctagttcttttaattgtgatgttagggtgtcaattttggatctttcctgctttctcttgtgggcatttagtgctataaatttccctctaagccaaaagaacaaagctggaggcatcacacttcctgactccaaactacactacaaggctacagtaaccaaaacagcatggtactggtaccaaaacagagatatagatcattggaacagaacagagccctcagaaataacgctgcatatctacaactatctgatctttgacaaacctgagaaaaacaagcaatggggaaaggattccctatttaataaatggtgcgggaaaaactggctagccatatgtagaaagctgaaactggatcccttccttacaccttatacaaaaatcaattccagatggattaaagacttaaacgttagacctaaaaccataaaaaccctagaagaaaacctaggcattaccattcaggacataggcatgggcaaggacttcatgtataaaacaccaaaagcaatgggaacaaaagacaaaattgacaaatgggatctaattaaactaaagagcttctgcacagcaaaagaaactaccatcagagtgaacaggaaacctacaaaatgggagaaaattttcgcaacctactcatctgacaaagggctaatatccagaatctacaatgaactcaaacaaatttacaagaaaaaaacaaacaaccctatcaaaaagtgggcgaaagacatgaacagacacttctcaaaagaagacatttatgcagccaaaaaacacatgaaaaaatgctcatcatcactggccatcagagaaatgcaaatcaaaagcacaatgagataccatctcacaccagttagaatggcaatcattacaaagtcaggaaacaacaggtgctggagaggatgtggagaaataggaacacttttacactgttggtgggactataaactagttcaaccattgtggaagtcagtgtggcgattcctcagggatctagtactggaaataccatttgacccagccatcccattactgggtatatacccaaaggactataagtcatgctgctataaagacacatgcacacatatgtttattgcggcattattcacgatagcaaacacttggaaccaacccaaatgtccaacaatgatagactggattaagaaaatgtgtcacatatacatcatggaatactatgcagccataaaaaatgatgagttcatgtcctttgtagggacatggatgaaattggaaatcatcattctcagtaaactatgacaagaacaaaaaaccaaacaccgcatattctcactcataggtgggaattgaacaatgagatcacatggacacaggaaggggaatatcacactctggggactgttgtggggtcgggggggggagggatagcattgggagatatacctaatgctagatgacgagttagtgggtgcagcacacagcatggcacatgtatacctatgtaactaacctgcacaatgtgcacatgtaccctaaaacttaaagtataataaaaaagagaaaaaagaaaccccccccaaaaaaagaaagagatatttattccttctatattttcctataaactcaaaagcctattaaaatgttaactatatggaaaatacataatacatactgatgacaaatttatttataataaaaatatcttagtatctttatatgtggatgatattgacaaagtttttctctttagttattttacaattgacttttaaaatgtcttgttattcagtaacgtctctaagtgctttccaacaataactgagaaaaataggtgattgaaacttgagagtttcacaggcttagtctacttctgaggtgagatgagaagccacagacagactatctctcaactatgatagtaatcttaattgatctcagaattttgctttactaggtcttaagcttattgttctttattacccattatttcacactttgcaactgactgggcattttgccagtgatcacaatgaataaaatgtggcttcagcggcctattactgtgctcaatgtctttgcaagttgctggcaaacatgattttattttagatactgttatatgaagtaattttttaaaatttatagtttgccaatttattcataaatttcttagtatcattttcattattaacacatttacataccgtgcttcacacttacctgtaaaatagtgaattctacatcaaaagtatttaacgagaacactggtggatgaagtgactatacttccaaagcaaaatcatctctttttaattcatcagcttagacggagaatgtttaatgttacttgtaaataatggactaacaaaaatccactaaccctaccttttgtgtttttatatgcaaaatagagttgtgttagactgtcttgaaattgactgacctgctctatataaaggcttgaggtgatcaggaatactctattctaaggatatgggagttttgacaattataatatccagaaaatataatatccattcatacaatatgaatggggaatgcaggtgtacttgtttatatatatatatatatatatatatatatatatatatatatatatattctattcatgtatacacattctgtgttactttctgtgttagcctgccacagtgtcatgaatgctaggagaagatacaggacccctggttcatggacaaagactttatttctcaaggcacagcaaggggcatgagttactcattcttattgttccttttaccccaaaagtctaacaagacaaagtagagggacctgagtagatactacacacagtggatttacatcagagcttagctactctaggctgaaggagcccaatcattttatcatgagatataagcaaacctccccaggatttgccttggagggagacatctttattaccaataagtaagaaaatatattcttgctttaaaaggggatactttgtctttcagaattgttctctacacaaagatcctttaaaagggagcctagtgcagaataacagttgtgcagaaatgcaaaagacacttggaggactgtctcctaacacctatcaaatgcagagtactacattaggtatcagggaaagaaagatgaaattatttgggctgatggaaatcagcagctcacttaaaagaagcatgagtggaaagttagttatggtaacgcaggagaggaagtgataccataatgtttaaaacagggagacatttagccaagtctaggaggtcagggagtacttttcaaagttaatacctgataagagttttgatgtaaattttctaaaaacgcttctatgtagctgtatctttcttactttcttaggggttctaggttatacaaaagtcaagaatttcaaggctttttattaaaaattgctcaacatatgtttctaagatttgtttgctaccagtagcctcctttagccaaaatttcataaggtttcaagattatataaagataatgaaaactaatctgaattagagtttttgcttaattagtaggatcttggaaattatcttgaagaatataagaagattttaataataattttatgtgcaaactcttgcccataacaataatgttttataattttatctccttctcatctcacttgaatatgcaatgttcaactaaaatcacttataaaagaagcaggaatatgggaatatttagcctttggggaatcttatttcctatgttgttgactatggcctccaaggaggaattttagatccctatttccctgcaagatgatctattatggtggattataacttctatgtctcattttatctcataatggataaagaaaacttggcacatataccatggaatattatgcagccataaaaaaaggatgagttcatgtcctttgcagggacatggatgaagctggaatccatcattctcagcaaactaacacaggaacagaaaaccaaacaccacatgttctcactcgtaaatggggctcgaacagtgagaacacatggacacagggagggaaacatcacacactgtggcctgttgggggttgggagggctagggtattaggagaagtatctaatgtagataatgagttgatgggtgcaacaaactctcatggctcatgtatacctatgtaacaatcctgtatgttctgcacatgtatcccagaagttaaagtataaaaaattccatatttttatattttgatgtacatattataccagtatagttatatatgtaaaaattttaagggtaaatacatataaaacatatattagtctttgatcagaattgtattaccaatataaataagaatatcatttagaatataaaattcctgattctgcaacaaatgacttaatattatcaatattaatcataattatttaaatgctttttagctgcccatcaccatattaataataggaataatgacagctaattttaattgagtacttcctaaatgtggcccagttacagtaaaacaaacactattagatacaccccatcaatcattacagcaagtctatgaaacatactgcattactaagtcaatattagaaatgaaaaactcatgggaaggatatgtataaaacttgctcaaagttacccagctaataagaggctaggacaagattaaacatctatgtagttttctttcctgagctgaagttcctaaatccttggctgcatggcgcctcattcaaaagtcctaaattggctaaaatatatataacagaaaattcacagaatcatttccttctacttgtccactaccagggctgttaacagtcccaagcaaaaggacaaaaattttttctacttgagataagaaaaatatacagggtgacagaaggtgttctaccaatataaaaacactttaccaggaaaattgagaagagggctgttaacctttggggaaatgtaggccttcagtggattcttgttagaaacataaagatgtagagagaagattttcatttaaaagcctcttccattcagcaaagtatattctgaatcctttatggtattaggctcccatatagttacaagtaaccccatgtggttttagaattcttaaatattcgcacacatagtcatctgaagaatgaataaatccatgaatgactaaacagagtttattcccatatcattttcaatatccctaaattatgcttacatccttaaatctgttacttcattctcaaagcacatagtctgtaactcataaaaataaactcctgttggccaggcacagtggctcacgcctgtaatcccagtactttgggaggctgaggtgggcggatcacctgaggtcaggagttcctgaccagcctgatcaacatggagaaaccctgtctctactaaaaatacaaaattagccaggattggtggcgcatgcctgtaatcccagctactgggaaggctgaggcagcagactcgcttgaacccaggaggtggaggttgcggtaagccaagatcaagccattgcactccagcctgggcaacaagagcgaaattctgtctcaataaataaataaataaataaataaataaacaaacaaacacctgtcttcctagtgttttatgtctatagttcagaaatgctttacctacttcatgatgtgtagtttgttctgatctgttccttttcttcattgtgtctagcctcataagtcatcttcctagttttggaataacctaatcccgtaaggtcattgctaatgtttcagctttgaataatttcctattttctgccctatgtattgaacccttctgttaattatgctgtctttaatatatcttacttgctttgaatagacttctgtaccattctacttataggttgttccagccaaactcattctaaataggtcaggcatggcctaaacattctaaataggccaggcatggtggctcacgcctgtaatcccagcactttaggaggctgaggtgggcaaatcaaaaggtcaggagttcgagaccagcctggctaaatgttgaaaccccatctctactaaagatacaaaaaattagccaggtgtggtgacttgtgcctgaaattgcagctactcaggaggctgaggcagttgaattgcttgaacacaggaggcagatgttgcagcgagccgagatctcaccattgtactccagcctgggtgacgggccgatactccatctccaaaaaaaaaaaaaaaaaaaaaagtaaagaaaaacatttatgaaagtgtgcacaacaaaattaaaatgttgactctaaagtgagcaactgaatgactgggatgcataagagaaaagggtacttaacatttttatacctattgaattgtatcctatgtacgtattataaatttaaatgtgcaataatgcagataactgaaatgtgggtatgctttgattaggactttgcatttcccatttgctcaaactcctcatgattctggatgcatatgaatagaaatacaaaatgtaaggggaccgaggacttctcatagccctttcttctttccacattttgtgtctctggctgtagtttgccatatgagtctatatggctaatgagcaaaatatttttcagatggatacctgtgaccaagcattgcattttaaagatatttctgaatcttggacctcttatttacagtgaagccccctcatgcatagtaaagcagacaggaatgtaaaaggttgctgcatcgataatcaatttctggtgagcagtaattataggtaatgtaaacagggacaattattgcttttcatcatatcttgagagaaatcctacagccaatgattttgaaaaaaataaaacatctaagttcactcttttctataatgaaaagacattatccagtagaagttcaagagtacagtctgaaggcagcttatctgacctggccacatggtcttgccactttagttaaagacaacttcctacacagtaacctctccagacctcagatcctcaactctctaaaatggaaacctagtagtatttacctctagaactgcagctgaactgagcattttaggaaaggaacaaacacacacacgatatatataatcagattatgaacgcagtgtggcccagagtgcaaaaatttctcagtactagagattctcaagagaaaaatgagatgtagtctatctcagtggcctttcatgtggcaaatgaaaagtgaaagtccataatgagaaatacatgggcagccagtgacaccacccattcaatgtagactctcaacatctctgacagtcattacctgttgtaccctgacctgcttatatattggggtaatatcaccttttgatcaaaacatacataaacctcaagcctcagtaagaaatatttatggacaaccagattttctgtgtttccagtcaaaactcaggtagaccacattttatgtgacaggagaaggcacagttgatgcccagttaaccctgagatcatctctgcctgcagcttcctatcatcatagcaagctctttccctgaagtacatcatctgtatctgctctttgctatataagtagcaaaaataagcatctgaaaagatgctcagcaccatatgtcactggggaattcaaattaaaacaacaatgagataccactacacatctattagactggcttaaatccaaacgctgacaccatcaaatgctggtgaggatatggagcagcaggaacactcattgattgctgctgggaatgcaaaatggtaaagccactgtggaaggcagttttgcaaattcctgcaaaactaaacatatgcttaccataagatctggcaattgcattctttggtgaatactcaaatgacctgaaactttatccactgaaattctgcacgtgaatgtttaaagcagcttatacatattcgacaaagattggaagtaaccaagatatcctacaatagggaaatggataaactatctctgaaacattcatacaatggaatattcttcaggaataaaaagaaactaccaaggcatgaaaagacttggaggaatcttaaacacgtatttctaagtgaaagaagccaatgtgaaaaggccacatagtgtagagttccaattatatggaatactagaaaaggcaaaactaggcagatggtattataaaaagttcagtggttgccaggggcttgagcaaagggaaggatgaataggtggagcacagaagatttttcgggcagtgaaacttttctgtgtgaccctataatggtggatatatgtccttaagcatttgtcaaagcccataaatggtagaacacaaagaatgaatgttaatataagccatgaacttaataatatcaatattggctcatcatgcataacaaatgtaccacattaacaagatgataatagaggaagtgtgtgtactatggtgtgaggcagatattagagcacaataggccttctgctctatttttctgtacgcctacaactgttctaaaaattaagtcaattatttatttatttattatttattaatttattttttgagatggagtctcactctgttgcccatgctggagtgcaatggcacgatcttggcttattgcaacctctgcctcctgggttcaagtgattctgctgcctcagcctcccaagtagctggaattacaggcacccagcaccatgcccggctaatttttttgtatttttagtagagacagggtttcaccatgttagccaggatggtcttaatctactgacctcgtgattcacccaccttgccctcccaaaatgcttggattacaggcatgagccaccgtgccaggcctaatttatctttttgagacaggttttagctctgtcactcaggctggagtgcagtggtgcaatcatggctctatgcagccccaacctccagggctcaagtaaccctcccacatcagcctcctgagtatctgggaccacagggatgtgccaccatgcctggcacatttcttagacctctgaaaagatgctcaacaccatatgtcactaggaatattcggtattcaactagaggcttcaatgggctctgaaatatcccctggtaaactctataaatgtgtttccaactggctgaatgaaaacaaaggtttacatctgtgtgagatgaattcacatatcagaaagcattttcactgagaacttttctagttttatagcaggatgttcgttttttcaatattggtctcaacgggctccaaaatgtccctttgtacagtctacaaaatgttttgccaacatactgaatcaaaacaaatgtttagcactgtgagatgaattttcacatcaccaaacatttttacagatagtttgtgtctagtttttaatcacaaaattttgaatttttcactgtaagcctcaaagggctctaaattgtcccctcttagcttctactaaaagagagttttgaacctactgtgtagaaacaaaagtttaactctgtgaaatgaattcccacattgcaaagctatttcacaggtagcttgcttctagtttttatcacgaattatttggcttttcactataggcctcaaatgggctccgaaatgtcccttcatacattctacaaaaagagtgtttccaacttagctgaatcagaggaaagtttaaactgtgtgagatgaaactgcaaattgcaaagcattttcacatatagcttctatagtttctatcagataatattcagtttttcactataggcctctgtggactatgaaatgtcccttcataggttatacaaaaaggtgtttccaacatgctgaatgaaaataaagatttaactttgtgagatgaacccacacatcacaaagcatttttatagatagattttctctagtttttattgcagaatattcaatttcatactataggcctcaatttgctccaaaatttcaccttgtagattctacaaaaagaatatttccaacccgctgaatcaaaaccgatgttcaattctgtgagatgatatgcaaagctttttcacagatatcctgtttctagtttttatcctgtggtgtttggtttttcactataagcatcaatgggctctgaaatgtccctctgtagattctacaaaaagagtgtttccaacctgttgaatcaaaacagttttaactttgtgagatgaagccacacatcacaaagcattttcacccatagcttgtttctaatttttaccatgggttattggtttttcactaaatgcctcaatggactaggaataattgccttgcagattgtacaaccaaggagtttccaacctgcagaagcaaaacacaggtttaactttgtaagatgaatctacacctcgcaaagcatttttacagataggttgctttgagttttcatcaagagatatttgattcttcactgtatgcttcaatgggctatgaaatctccccttacagattctacaaaaaaagtttccaaactgatgaatcaaaagaaaagttcaacttttgagatgaaatcacacatcacaaagtattttcagaaatagcttctttatagtttttatcacaggatattagattttccaatattagggtcaatgagctctgtaatgtccctttgtagattgtacaaaatgagtgtttccaacctatggaataaaaaggaaggtttaactctgtgagataaatccacacatcacaaagcatcttcacagatggcttgtttctaatttttattgtgggatattctgtttttcactaaaggcctcaagcgctccgaaatgtccctttgtagattctataacaagagtgttttaaaactgctgaatcaaaacaaatgtataaccctttgagaggaatccacacatcacaaagcatattttcagatacttgtttctagttattaaagcaagatattcagtttttcagtatatgcctcattgggctcagaaatgtctcatagtagattttgagacatagtagattttgaaacacaaaaatagtgtttcctacctgccgaatcaaaacaacagtttaaacctgtgagatgactccaaacctcgcaaagcattttcacagatagtcgtttcctagtttttatcacaggatactcggtttttcagtataggcatcaatgaactctgaaatgtccactcataggttctataaaagtgtgttcccaactccctgtataaaagcaaaggtttaactctgtgaaatgaatctgcacattggaaagcattttcacaaatagcttgtttctagcttttatgatgagatatttgattttttactattggcctcaatgggctcagaaatgtctctttgcagattctaaagaaaaaaggtttttcatttttctgaataaaaataaaggtttaactctttgctgtgaaatcacacatcacaaagaatttttacaaacagcttgttcctagggtttatcactggatattgggtttttcactataagcttcagtggagacttaattgtaacttaattcacaaaaagagtgtcccccaacctgctgtatgtaaataaaggtttacctctgtgagataaatcttcacatcacaaagcattttccccgatagcttttttctagtttttatctcgggatattgatttttcactataggcttcaatgggttttgaaagtttcctctgtagattctacaaaaagagtgtattaacctgctgaatcaaaacaacgtttaactttttgagataaatccacacatcataaagcattttcacagatagctctttttttttttttttttttttttaagatggagtctcactcagtcacccaggctggagtgcagtggtgtgatctcggttcactgcaagctccgcttcctgggttcatgccattctcctgcctcagcctcccaagtagctgggactacagatgcccgccaccaggccaggctaatttttttgtgtttttagtagagacggggtttcaccatgttagccaagatggtctcgatctcctgacctcatgatccacccgcctcagcatcccaaagtgttaggactacaggcgtgagccaccgcacctggccgatagcttttttaactttttattttgggatattggtttttcactacaggctgatactggcttcaaattgtaccctcatagattctacaaacagtgagtttccaagcatctgaaatgctagatattcggtttttcactgtaggcatcaatttgctctgaaatgtcctattgaagattttaccaaaagagtgtttccatcctgctgaatcaaaagaaggtttaattctgtgtgatgaaattacccatcgtaaatcattttcagagacagcttcatatagtttttatctcagaatattccgtttttcactttaagcctcaatgggctttgaaatgcctcctcataaattgtacaaaaaaaaggagtttccaacatgttgaatcaaaacaaatatttaatgttgtgagataaattcaaatatcgcaaagcatttttacagattttttttctcatttttatcgcggaatattcggtttttcactagtcctcagtgggctcagaaatgccccttgtatgttctacaaaaagaatgtttctaacttgctgaaccaaaacaaaactttaatgctttgaggtgaaaccacacattgcaaacattttcacagatagcttgtttctagttttgatcacggaatattggatgttttacaataggcctcaacgtgctaagaattgtcccctcttagattctactagaagagtgtttccaaaatgctgtataaaaataaaggcttaacactgtgagatgaactgacacatcacaaagcattttcacaggtaggttgtttcaacttttcatcatgtgatattcagtttttcaatatattcctccatgggctctgaaatgtcccttcatagattctatgaaaagactgcatccaactgactgaatcaagacaaaggtataactctgtgagagaaatgcacacatctcaaagcattttcactgatatcttgtttctagtttttatcatgggataatttgtttttgactataggcctcaatgggtttcaaaatgtccctttgtagattctacaaaaagagtgcttccatcctgctcaatcaaagcaaaggtttaattctctgaaatgaatccacacatcacaaatcattttacaatatagcttgtttctagtttttattgtgggatatttgattttttactttagacctcaatgggctctgaaatgtgccttcttagattctacaaagagagtgtttctcacctgctgaatcaaaacaaaggtttaattttgtgagataagtccacacatcaccaagcatttttataaatagcttgtttctaatttttatcatgggatattcagttttttcagtgtaggcctcattggtctctgaaatgtcccctcatagattctacaagtagagtttttgcaacctgatacaccaaaacaaacatttaattctgtgagataaatctataactctacacgtctgaaagcattttcacagatagcttgtttctagtttttatcacaggatatttgatttttcactatagacctcaataggctctgaaatgtcccctcaaaaattctacaaaaagagtgttttcaacctgctgaataaaaacaaagttttaactctgaaaaataataaatcataaaacattttcacagttggcttgtttctagtttttatcacgcgatactcagtttttcatgacagggcacaatgggctccaaaatgtccctttgaacattctacaaaaagagagattttggcctactgaataaaaacaaaggttttatactgtgagaggaatccacacataggaaggaattttcacagatagcttgtttctagttttcaacacaggatgttcaggtttttcatatacttcttgatgggctctgaaatgtcccttcatagactctacaaagacagcatttacaacctgctgaataaaaacaaaggtttaacctgtgagttgaatccacacatcacaaagcattctcatatatagcttgtttctagtttttatcttgagatataacgtttttaactttaggccttaatgttgtctgaaatgtgccattttagtttctacaaatacagtgtttcaacctgctgaattaaaacgagatttaactctctgatatgaattgacacatcacaaactattttcacagatagctttttactagtttttgtcatgggattttaagtttttcactaatggctttcatgtactctgaaatgtccctatgtagattttacaaaaagagtgtttccaacctactgaatcaaaacaagggtttaaatctgtgagatatatccatacattgcaaagcactttcacagattgctagtttctagtttttatcatgagatacttggtttttcactatagacctcaataggctcccaaatgactctcatagattgtacaaaaagagtgttttcaaagtgctgaatcaaaataaagatttaactcagtgaggtgaatccacgcattgcaaaatattttcacagatagcttgtttttttttttgtttgtttgttttgtttttattgtgggatatttcatttttcactacaggcctcaatgggcaccaaaatgtcttctcctagatcctacaaactgactgtttccaacttgcttaatcaaaacaaaggtttaaccctgtgatatgaatacacacatcccaaaggattttcacagatagcttatttctagtttatatctccacttattttgtttttcactgtaggtttcaatgggctttgaaatgtttctttgtagattctgcaaaaagcttttcaaatctgccgaattaaaacagtatttaactctttgagatgaatccacacactgcaaagcattttcacaggtagctttttttctagtttttatcatgggatatttggtctttcactgtagtagtcctcaatggactctgaaatggcccttagtagattctacaaaaaagagtgtttccaacctgctgaatcaagataaatgtttaactctatgaaaggaatccacacaatgcaaagcattttcacagatagcttgtttgtggtttttattgcaggatatttggtgttttaatgtacttgtccatgggctccgaaatgtctcttcatatattctacaaaaatagtgattccaacctgctgaaaaaataacatgtgtttaactctgagagatgattccccaaatcacaagacgttttcacagacagcttgtttctagttttcattgtgggatatttaacttttcactagaggtcttaatgagctttgtaatgtccttttgtacaatctacaaaaagagagtttccagtctgctgaatcaaaacaaaggtttaaacctgtaagatagatccacacattgcaaaacattttcacagacatcttgtttctacttttcattgtagcatacttgctttttccaaatacttctccaggggctccatattgtcccttcgtaaattccacaaaaagagtgtttccaaccagctaaatcaaaacaaaggtttaaatctgtgagttaaatctatgcattgcaaagcattttcacagatagcctgtttctcatttttatcatgggatatttggtttttcaccataggcctcaatgggtactaaaatgtcttctcatagattctaaaaacagactgctttcaacctgcttaatcaaaagaaaggtttaactccatgatatgaatccacacattgcaaagcattttcacagatagcttgtttctagtttttttctccacatattttgtttttcactataggcttcaatgggctttgaaatatttctttgtagattctgcaaaaagagtttttccaccctgtgtatttaaaacactggtttaactctgtggcatgaatccacaatggcaaagcattttcacagatagcttttttcttgtttttttttttttttttttttgggtggggtgggggcgatatttggtctttcactgtaggtctcaatgggctctgaaatggcccttcatagattctacataaagagtttttccaacctgctgaatcaaaacaaatgtttaattctggaagatgaatccacacatcacaaagcattttcagatatagacttttattgtttttattgtgaaatattttgttttttactataggcatcaatgggtgtgaaatgtccattcatatattctataaaaaagtgttttcaacctgctgaataaatgcaaaggtttaaatatgtgagatgcacccacacattgcaaagcattttcaaagacagcttgtttccacttttatcctgagatattttgtgtttcactatgggcctcaatgggcttcaaactgtccctttgtagattctacaaaaagagtgtttccaatctgcttaatcaaaaaaatgattaactctgtgagatgaatccacatatcacaaagaatttttactgatagcttgtttctggatgttatcacgggataatcggttttttatcaacctgctgaatcacaagaaagatttaactctgtgagatgaaatcacacatcacatataactttcagacacagctttttgtagtttttatcacagggcattaagtttttcactacaggcttcaatgggctttgaaatatccttgtgtagattgtacaaagagagtgtatccaacctgctgaatgaaaacaatatttaattctttgagataaatccacacataccaaagcatttttacagataggttgtttccatttttcatcatgagatattggggttttcactataggtttcaatgggctctgaaatgtttcttcatagattctagaaaaggagtgtttcaattcgattgaaatgagtgttctgattctgctgaatcagaaggaagttttaactctgtgagatggatccacacattgcagagctttttcacagataccttacttctggtttttttcatgggatatttggtttttcactataggcctcaatgagctccgaaatgtttttatgtagcatctaaaaaaagagtttttccaaactgatgaattaaaacaaaggtttaaatatgtgacattatttcacatatcacaaagcattttcacagataccttgtttgtagtttttatcacaggatattctgcttctcactataggcctcaagggtttgaaatgtctttccttagatttatgaaaaacatgtttctagcctactgaatgacaaatgtttaactctgtgagatgaatccagacactgccagtcgttttcacagatagctgtttcctagttttgtgtgtgggggatattcgctttttcacaatatgcctcaaaggtctcagaaattcccattagtagattctacaaaaagagtgtttccaacatgctaaataaaaaaaaaactttaactctgtgagaagaatccacacatcacaaaatattttcactgatagcttgtttttagttttcatcgtgtaatatttgttttttgtttttgttttttgatttttgttttttactataggccccaatgagctctgacattttttctttttagattcaacaaacagagtgtttccaacctattgaatcaaaagaaaggtttaaatttgtaagatgaatccacacatcgcaaagcatattcacagatagcaagcttctagtgtttttttttttttctgcaggatattctgtttttcactgtaggcctcaatgggctctgacatgtttgttggtagatactactaaaagactgtttcaaacctgctgaatcaaaataaaagtataactctttgagatgagcccacacatcctaaagcattttacagatagcttacttctagtttttatcacgagatattctgtttttcactatagacctccatgggctccgaaatgtccccttgtagattctacaaaaagaatgtttccaaattgctgaattaaaacaaaggtttaactgtgtgacattatttcacagatcacaaagcattttcacggatagcttgtttctagtttttattgcaggatatttggttttaaactctaggcctcaatgtgcttcaaaatgtctcatcttagattctacaaaaaacatgtttccaacatgctgaatcaaaacaaaaggttggctctgtgagataattccatgtctcacaaagccttttgacagatggcttgcatcaagttttcttcatgggatattccatttttctccataggcatcagtgggctccaaaatgtccctttgtagatactacagtgaaagtgtttctaaactgctgaattaaaacaaggatttagttttgtgagataaatccagacatcacaaagcatttcactgatagtttgtttctagtttttatcacaggatagtcagtttcttactataggcctcaatttgctctgtaatatcccctgttagattctagaaaaggagaatttccagtctgttgaatcacaagaaatgtttaactctgtgagataaaatcacacattggaaagcattttcagacatagcttctttgtagtttttatcgtggtatatttggtgtttcattataggcctcaatggattttgaaattttccctcatagggacacaaaaatgtctttatccttctgaatcaaaacaaagttttaactgaaaaaaaaaaatccacacatagcaaagcatttttaccatatctgccaagaaggaaactcttgttctcccaattttatcagaaggctgcctgattcctataggatgagaagcaggcagcggtgtctggatttgcctggtcatctaggctctgttacatatcatctgcatgttctttttcattgtggaggggatcttttatggatctgttgctagcggggactgcctctctttacagatcttttggctgccaggaatttcaaggagcaaaaagtactttgggtaggctggctgcactccaggttgtgagtagcggtctcactgtgggggactgagatgtttgcagtttgcaggaggcttttgggttctctggcaggaatccttgaacatggctttgactctagcacaggccctctcattctccaagggaagcattgattttccattgctttcatgaggagtccatactactcttcatcagcactcctaaacacactttttttggcttgcaattgcctcaggcggccactgagacgctctctgaactgcatctgcacctgtgaagtcagtccaaagtgtgagacttctgcttcactttgaacttgcctttgtcatggttcctgcctttcccaaagagccatgttgagaagcaggagcccctgtgaggcccaggatgaagggaggcagtgagctcaagggcccggccattttctgctgacatctgcctctggggtctcaggtatgatttcatcacctggacaccccttaacatctcagcagactgtattcccttcccccatgggacccgattcttgcacacagcctctttcgggaatggaatcggaagaacagtttctagctcccacctcagtctccaagtgcctcctcctccagcgggacctgaccatggagacagcccgaagaggcctgcatagagggttcgggggtgagtctttttgaaacttgccccctctgtgatgtctaagtacagcctgcctgtgttccccaggctgctctctcccaggaggggcttcctgcagaaacacacagcctctgaagctgctgggatgtgtgtttctttgggaatgtttcaagttgtggatatctgcgtgtgggtgcagacatgtgagtgtgtgtgtgtgtgtggggggtaagtggagtctgctgaaagaaatgtggctaacgcactgcagcactttgttttttgtcaccccaccttccggtggcctgtctctgtggctctgcttgggctgagggtctccatgttcttcatttttccatggctcctgagtccacagtaaattggaagaatggctgacaaccgccagggtcaaaatcacctccccttgcaaaaaaaccacatttctaaaaagaagagaagcacaccacaccccaaaacagacaactccccgtgctttattgttctgtggccagccctgggccagacccccgcagtccagtcgcagggctttttgaatttacctcgattttggtttgtagctgagcaggtgcttcaggtcatcaggaagcactcctccattgtctcggaattttattctgggatgcagagtgtgagcaacaataaggtcagataggggtgaggatacagtctgttgaggtatggatgggatctcgcaccttcacctcaaaaaaggtgcagacaaatgacacagaagttgcttctaactgcatcccctcattcccttcattgcacagtcaacagcatggcccggtgcccaggtgggatgactcaatcgtgcagagaaaagttggattgtaaactggggcccttcaggccagctccagaattgagctttcattcctggagccacattggagtgagacggattgatgctgggttggatgtggcctccacactggcctcctcttttcctgacttccatgtcccttgtgggcctagagtttcctaggtctggcttagagtttcttccatgttcctcatgaacctggggtttttaagggtctggctcaaagtcttccacacaaaaagtttctcagttcatggaggacgactctaatgggaatcaattgcatcagtgttttcttataaacactgtcatgttttaatgactgggcagttgtgatagttttggaatcgtaaattttgagtatatccacgatcaaggtaactcttgttctcccacttctaaaggacagctgcatgactcctgtaggatgagaaacaggcagctgtgtctggcttttacctggcaatctaggctctgtttcatgtcatctgcacttcctttctcattgtggatggggcttttcattgggctgttggtgggtgggactgcctttcatcgtggatgttttggttgccaggaatatcagagagcaaaaggtattttgggtaggctgcctgcacaccaggttgtgggtagtggtctcatagtggtggctggcattgtttgcactttgcaggaagcttttaagtcctgtggcaggaatccttgaacatggcttggactcctgcgcaagtctgctcattctcccaggaaagccttgatttttctttgctttcatggggggtccacagtgcccatcaatggcactcctggacgttattttcaggtttcaaattgccccagacagcctctgagacactctctcaacctcaagtgcacccgtgagaggcctgttagaggtgtgagaacactgctccaccttgaacttgcttttgtcatggtttctgcctttcccagagagccgtgctgagaagcaggagcccctgtgaggcccgggatgaaggaaggcatggggttcaagggcctggctgttttccactgacaccttcctcttggatctcagatatcccatcacctagagacctcttaacaactcaccagacattattcccatcctcaggagacccaattcatgcacacatccttttttgggaatggagtcaggagagcagtctccagagcccacctcacagtcttcaaactcctccttctcctgtgggaccctaccacagagatggatcataaaggccctatgttcgagactattagcgtgctgcagttggttgctgcaggcagcctttttctggcgactaggccggttctggctgtaccattttcctgagctttggcaggcttacagccctgacagccaggtgcctgagcctgcctggtgaatgcgcatgtgacagccaggtcaccaggcaccagtggtgagcagtggctcacgtcacagtgaatgccaccgttgcctggtgacaagtcccttcatcttggcagagaaggaatcctctgtggatgtgtgtcagtgttggactctcacctgtctactctgagggctctatgggatattcccacaatccttggagtgggcagtggtgagccagcctgaagaaacatcaagtggagccccaggaataaaccacgaaatccctaaggatccaaaaggatacccatgatgagtcaggcctgcctagacggtgtgggggtgagtctttttgaaacttcctccttgtgatttctaggtacagcccacctctgtttcctggagctgctttctctcagaaggggctttctgcagaaccacgcagcctcaggagctgccaggctgtgtgtttctgtggaattgttgcgagtgttcggatgtctgcatgtgtgtgtggctgtgtgtgagtgtgtttgtgtgtgtctgtgtgtgtgtgtaagtggcatctgctaaaaggaatgtgactaacgcaccgcagcactttcttttttttgagtcccttcaccttctggtgcacctgtctgtgtggctctgcttggcctatggggctgcatgttctttgtttttccatggttcctgagtccacagtgagttgggggggggggatggctgagacccacaggtgtacaaatcacctccccatacaaaggagccactcttctagaaaaaagaggagcacatcactgtcaggaacagacacctgtcagggcctcattttcctttggccaacccagagtgggaccctagcagtcctgtctgcaggccccttgaatccaattcaaattcagtttgcagctgagcaggtgcttcacatcatgaagggagcactcctccaacatcttgggatttcattctagaactaagagtgtgagcagcaataaggtcagataggggtgagcatacaatctgctccttcatctgcaaaaaaaggtgcagacagatgacacaggaagtgcttccaactccatccttgcattcccttcattgcacaagctgtccacaacgtggccctgtggccaggtgggaggactccaacttgcagggaataaaaaataaggtttaactgatacaaaaagtttatctctgtaagatgaatccacacatcacaaatcatttgcaaagatagcttctttctagtttttatgccaggatattaggtttttcactgtagtctacaataggctccgaaaagtcccttcatagattctacaaaaaaggtattttcatcctgttgaattaaaacaaaggtttaactctgtgagataaatccacacttcacaaagcattttcacagatagatagtttttagtttttatcgtgaaatatttggtgttttactttagtcctcaatgttcacaaaaatatcttttctgtgtatgctacctaaagagttttgtcaacctactgaatgataataaaggtttaactttgtgagatgaatccacacatcacaaagtattttcactaatagatcattgctggtgtctatcgtgggatattcagcttttcaatatacttgtcagtgggctccaaaatgtccttttgtagattctttaaaaagagtgtttccaatgtgctgaatcaatataaaggtttacctctgtgagatgaatccacacaccaccaagtgttatcaaatattgcttgtttctagtttttatcttgaaatattcattttttcactatcagcctcagtgagctccaaagtatcccttcataggttgtacaaaaagagtgttgccaacctgctgaatcaaaacaaaagtttaagtttgagttcgtgagacaaatccacacatcagaaagcattttcacagatagcttgctgctagttttaatcactggtattaggtttttcagtatatccctcaatgtactttgaaacgtccctttgtagattctattaaaagaatgttttcagcctgctgaatccaaacaaaggtttaactctgtaagatgaacccacatatggcaaagcatttacacagatagcttgtttctagtttttatcagagaatattcaatttttcatggtaggcctcaatgggctctgaaatattcctttgtagattctacaaaaagagctattccaacctactgaatcaaaaaaaattatctctgatagatgaattcacacatcacaaaatattttcacagatattttgtttctagtttttatcacaggatattaggtttttctctataggcctcagtggtctctgaaatgttcctttatagattctacaaaaagagtgtttccaacctactgattcaaaacaaaagtttaactccatgagacgaatccacatatcgcaaagcattttcacagataacttgtttcaagtttttatgatggggtattttgttttccactgcaggcctcaattgacttcaaaatatccctttgaatgttctcaaaaagagcgtttttgacttgctgtaacaaaacaaaggtttaactttgtgagataaatccacacattggaaagtattttcacagatagcttgtttcctgtttttacagcagaatattcaattttacaaatataggtctctatgggctgcaaaaggccgcttcatagattctacaagagttttcccaacttctgaatcaaaacaattttaactctgtcagttgaatccacacagcacaaaggattttcactgatagatttttctagattttatcaaggaatatttggtttttttattatagttctcaataggccctgaaatatcttttaacacatttcacaattagactgtctgcaacctgctgaataaaaacagaggtttaactctgggagatacatccatacatcaaagcattttcacagatagtttatttccagtttttattgtgagacattcgattttttaaaaaaggcctcaatggtctccaaaatatcccttagtagattctccataaatagtgctttcaaactgctaaaccaaagcaaagctttaaccttgtgatatgaatccactcattgcaaagcattttcacataaaactttttctatttttcatcatgggacatttgcatttttactacaggcctcaatgggctccaaagtgtctcttcataggttctacaaaaaaaggtgtctccaacctgccttccatagattttccagaaacagtgttttcaacccgctgaatcaaaacaaagatttaactctgtgtgatgaatccagacatcagaaagcattttcacagatagcttgtttatagttttaatcacaggatattcactttttcactataagcctaaataagctttgaaatatccctttgaagattctataagaagaatgtttccaacctgctgaattgaaacaatggtttacctgtgggagatgaattcacacatcacaaagaattttcacagatatcttgtttctactttttatcatgggatattcagttttccactgtaggcctcactgggctttgtagtattccttcatagattctacaaaatggatgttcccaacttgctgaatcaaaataggtttatctccgtgagataaatccacacatcacaaagcattttcacagataccttgtatctagtttttatcacaggacatttggtttttccctacaggcctcgatgggccctaagtggtcccttcgtagattctacaaaaaggaatgtttccaacctactgaatcaaaacaaagtttaaccctgtaaaacgaatccacacattgcaaagcattttcacagataccttgtttctagtttttatcagaggacattcaactttttctaacaggcctcaatgggatcaaattgtccaatcatagatcctacaaaaagagtgtttccaaactactgaatcaaaaccaagtttaactctgtgaaatgaatccatacatcgccaagcattttcacagatagcttgtttccagtttcaattgtgggatatttggtttatcgctatagtcctcaaagttctctgaaatgccccttcatagattgaacaaaaaagtgtttccaacttgctgagtcaaaataaagtttaaactctgtgatatgaatccacacatggcaaagcattttaacacatatcttgtttctagtttttattgcatgatatttggtttttctgtatagacctcaataggctttaaaatgtctcttcatagattctacaaaagtgtttctaacctgctaaatgaaaacaaattttaactctgaaatgaatgaacacatcacaaaacattttcacagataggttgtttctagtttttatcatggggtattcgggttttcactataggcctcaatatgattttaaatgtccctttctagatgctacaataagagtgtttccaagctacagaattaaaaaaaaaggtttttctctgagagatgaatccacacattgaatagcattttcacagatcgcttgtttctcatttttatcacaggacattcgctttctcactataggcctcaatgggcttcaaaatatttcttcctagatcctaccaaaagagtgtttccaacctgctgaatcaaaaaaatggtttaacactgagatgagtccacagatcacaaatcatcacagatagcttgtttctattttttattgtggaatatttagtttttcattatgtaactcaattggctttgaaatgttcctttgtagatcctaagaaagtagtgtttctaacctgatgaatcaaaacaaaggtttaactctgtgtgatgaatccacacattacaaaggattttcccaaggagcttgtttctagtttttatcatggaatattatgtttttcactataggcctcaataagctctgaaatgtccttttgtagattctacaaaaagagtgtttccaacatgcagaattcaaacaaagggttaactctgtaaaatgaattcaaacatcacaaaacatttttatggatagcttgtttctagttctaatcacaggatattcaacatttcactataggcctcaatggtctccaaaatgtttcttcatagattttttacaaaaagagagtttccagactgctgtgcaatacaaaggtttaactctgtgagatgaatcctcacattgcaaagcatattcacagatagcttatttctgtttttatcacgggatctttgatttttcagtataggcctcaatgggcttagaaatgtcacattgtagattctacaaaacagtgtttccaacatgctgaatcaaaacaaaggtttaactttgtaaaatgaatgaacacatcacaaagcattttcacaaatagcttgtttctagtttttaattgcaggatatttggttttcctctgtacgcctcaatgggatctgaaatgtctctttgaagatggtaccaaaagagtggttccaacctgctgaaacaaaaaaaaaaggttgaactctgttacatgaatccacaattgcaaagcattttcacatacaacttgtttctagtttttaccatgggatatttggttttccactgtaggcctcaatgggctctgaaatgtcccttcacaggttctacaaaaagagtgtttctaacctgttgataaaaaaaagatttatctctttcagataagtctacacgtcaaaaagcattttcacaggtagcttgtttccagtttttatcatgtgacattttgtttttcactatagacctcaaagggatcagaaatgtctcttttacattccactaaaagagtgtttcaaacctgcagtacaaaaaaaaaggtttaactctgtgaggtaaatccacataatgcaaagcattttcacatataacttgtttctagtttttatcctgggatattctgtttttgtccctaggcctcaatgggctttgaaacatccctttgtggataatgcaaaaagagtgtttccaccttgctgaataaaaaaaaaaaaaagtttaagtctttgagatgaatcaatacatggcaaatctaattcacagatagcttgtttctagtttttttgagggttgttcatttttcactataggcatcaatgggatctgaaatgtcccttcggagattctacaaaaagagtgtttccaagctgctgaattgaaacaaagttttaacttttgaagatagaaccacacatcacaatgcattttcacaaatagctggtttctagtttttatcatgggatattggttttcactacatgccaaaatgggctccaaattgacctctcatagattctacaagcagagagtttccaaactgctgacgcaatacaaaggtttaactttgtaagataaatctacaaattgcaaagcatttttacagatactttgtttctagcttttatcacagtatattctgtttttcactacaggcctcaatttgctctgaaatgtcctgccgtatattctacaataagaatgtttccaacctcctgaataaaaagaaagatttaactctatgagatgaaatcatgcatctcaaagcatttttagagatagcttctttatagtttttattaggattttaggtttttcactatcagcctcaatgggctttgaaatatctcctcatcaattgtacaaaaagagagtttccaacctgctgaatcaaaagaaaggtttaatattgtgaaacaaatccacaaattgcaaagcgtttttacagattacttgtttctagtttttatcacgggatatttggtttttcactataggcctcagggggataagaaatgtcccctcgttgattctgcaaaatgaatgtttccaacctgctaagattccaacctgctgaatcaaaactaacattcaactctgtgagatgaatccacacattgcaaagcattttcgcagatagctagtttctagtttttatcatgggatattcagttttttactacaggcctcattgggtttgaaatgtccccttgcagattctagaaaaatagtgtctcccacctgctaagtcaaaataaaggttaaactctgtgagatgaaaccacacattgccaaacatttttacagatagcttgttctagtttttatcatggcatatgtggtttttcactataggcctcaatgagctcaaaattgtcccttcctttattctacaaaaggaatgtttccaacctgcccagtcaaaacaaggtgtaactctgtgagatgaatctacacattgcaaaacattttcacacatagcttgtttctagtttttatcctgggatatttggtttttagtacaggtctctatgggctccgaaatgtcccttcatagatattacaaaaagagtattttcaaccttctgaactaaaacaagggtttaactctgcaagatgaatccacacatctcaaagcattttcacagataatttgttgtcagtttttatgagggatttttttttataataggcctcaaggactcagaaatttcttattttagattctactaaaacagtgttctcaacctgctgtatacaaacataggtataactctgtgagataaaaccacacatcacaaacattttcacagatagcttgtttctagcttttatcacaagatattcagtttttttcactacaggcctcaatgggctctgaaatgttccttcatagattctacaaaagagtgtttgaaacctgcagaatcaaaataaaagtttaactctgtgagatgaatccacacatcacagagcatttttgctaataatttgtttctagtttctatggtgggatattttgtttatcaatataatcacacatgggcttcaaaatgtcccctcatagagtcttaaaaaagactatttccaatctgctaagtcaaaacatatgtttaactctgagggataacccacatatcacaaagcattttcacagatagattgtttctagtttgtatcgtggaatattgggtttttgactatgggcttcaatggactctaaaccatcctctcttaaattctacaaaaagagtgtttccaacctgctgtatataaacaagagtttaactctgtgagatgaattcagactcaaagcatttttatggatagcttgtttctgtttccattgtgaaatatttcatttttcactataagccttaatgggctccaaaatatcccttcgtaaattctaaaaaaagagtgtttcacaactgcagaatcaaaacaaaggtttaactctgtgagacgaatccacccattccaaagcatttttactaataattcgttgctagtttctataatgggaaattcagcttatcaatgtactcgtccatgggcttcaaaatcgccattcatagactctttaaaaagagtgtttccaatgtgctgaatcaaaacaaatgtttaaatctgagagatgatttgcatattgcaaagcatttcacagatagcttgattctagtttttatcagggaatattcagtttttcaccataagcctcaatggtctttgaaatgtcccttcttagattctactaaaagtgtgtttccaacctgttgaatagaaacaaaaatttaactatatgagatgattctatatgtcacaaagcattttaccacatagcttgtttctagtttttattgtgggatattgtttttcactgctggccccaaagggctctgaaatgtccctttgtatattcctcaaagtgagtgattccaaactgctgaagttaaaaaaaaaaaaagtttgttgtgcttttttttgttgttttttttgagatggagtctctctctgtcacccaggctggagtgcagcagcgtgatctcggctcactgcaagctccacctcctgggtccatgccattctcctgcctcagcctcccgtgtagctgggactataggcgccggccaccaggcctggctaattttttgtatttttagtagagacagggtttcaccgtgttagccaggatagtctcgatcacctgacttcatgatctgcctgccttggcctcccaaagtgctgggactacaggcatgagccactgcacccagcaaaataaggttttactatgtgagatgaatccacacatcacacagcattttcagaagtaaatttttaattgtttttatcatgaaatattcgttttttttactatagactttcataggtatgaaatgtcgtgtgttctagaaaaaaaggattcccaacctgctgaataaacacaagggtttaactttgtgagatcaatccacacattgcaaagaatttttactgatagcttttctctagtttttatcacgggataatcagtttttcagtacaggtctcaatttgctttgaaatgtcctctagtacattgtagaaaaagagtgtttccaacctgctgaatgacaagatagtttaaactgtgtgagataaaattacatattgcaaagcatgttcagacatagcttctttgtagtttttgtgttttttttcccccgtgggacatttggtttttcactgtatgcctcaatgggctctgaaacgccccctcatagattgtacaaaaagattgtattaaacatgcagaatcaaaagaaaggtataactctgtgagataaatccacacatagcagagcattttcacagataggttgtttctagtttttatcatggaatattctgtttttcactacatgccttaacgggcttcaaaatgttgcttcatagattctataaaataagagtttacagcctgctgaatcagaatgaaggtttaactctggaggtgaatctgcacattgtaaagcattttcacagagagctttcttctttcttttttagtgaggaatatttggttattcattgttggcctcaatgggctccaaaatgtcctatcatagattccacaaaattaatgtttctgacctacttaagcaaaaaaaaagtcttaactctgtgacatgaatccacacatcacaaagcattttcacaagtagcttgtttgtagtttttatcacgggatatttggttttacactatagacttcaatgggcttcaaaatgtcttttcttagattttacaaaaaagtgtttcctacctggaatcaaagcaaaagtttatctctgcgaggtgaattgacacattgcaaagtattttcacaaatagcttatttctagtttttatcatgaaaaatttgattttttactattggcttcaatgggccctgaaatgtccctttgtagattctacaaagagagtttttccaacctgctgaatcaaaacaaaagtttaactctatgagatgaatccacacattgcaaagcatttttagagattgctttttcattgttttcatcgcgaaacattcgttttttactgtaggcgtcaattcgtgtgaaatgtcccattgcatattctacaaaaaaagtgtaccaaacttgctgaataaaaacaaaggtttaactttgtgagatgaatccacacattgcaaagcattttcacagatagcttgttactagtttctatcttgcaatatttgttttttaaatataggcctccatgggctccaaaatgtccctttgtagattctacaaactgagtgtttacaacctgctgaaccaaaacaagggttcaactctgtgagatgaatccatatatcacaaagcatttttacagatagtttgttttcagtttttattgggggatattttgtttttcattataggcctcaaaggtctcagaaatatcttcttttagattctactaagagagtgttagcaaactgctgtatataaacataggtttaagtctttgaggtaaatacacacattgcaaacattttcagatatagcttatttctagattttgtcacaagatatttggtttttcactagaggcgtcaatgggttcagaaatgttccctcatagattatacaaaaagtgtgtctccagtctgctgaatcaaaaaaaaaaaaaaggtttagctctgtgagataaatccacacattgcaagctaatgcataatgcagagatagtttttttctagttttatcacaggatattggtttttcactataggcctcaatgggctcagaaacgttcctttgttgattctacaaaaaatgtgtttccaaccaactgaatcaaaacaaaagtttaactctgcaagatcaactcacacatcacaaagcattttcacagatagcttgtttctagtttttatcaagagatactcgatttttttttattgtagacttcagtgtgctctgaaatgtcctttcatagattctacaaaaacagtgttttcaacctgctgaattaaaatgaaagttaaactctgtaagatgaaatcatacatcaaaaagcattttcacaaatagattgtttctggtttttattgtgggatatttggtttttcaatataagcatcaatgggcttcgaaatgttccttcttaaattttacaaagagactgttttcaacttcctgaataaaaacagtggataaatctgtgagatgaatccacacattacaaagcattttcacaggtaattattttttagtttttctcatggaatattgtgtttttcaatataggcttcaatggactctaaaatgtcctctcttaaattttacagaaacagtgtttgcaatgtgctgtatataaacaaaagttttcctctgtgagataaatctacacacacaaagcattttcacagataccttgtttctagttttcatcataaaatatttgatttttcactataggcctcagtgggctccaaaatgtcccttcatagattctacaaaaaaagtatttccatccttctgaatcaaaactaaggttttactctctgtgatgaatttacacattgcaaagcattttcatagatagcttgtttctagtttttattgtgggatatttggttttttattataggcctaaaagggctcagaaatttcttcttttagattctactaaaagagtgtttccaaattgcactataaaaaccaagtttacttctgtgcaataaatcaacatatcacaaagaatattcacagatagcttgtttctagtttttatcacaggatattgtgtttttcactaaagcctcaatgggctttgaaatgtccctctgtagattttataaaaagagtgtttttaacctgctgaatcaaaacaacgtttaactttttgagatgaatccacacattgcaaagcgttttcacagatagattgtttctagtttttattgcaggatattgttttttcactcaggccaatatgggcttcgaattatcccctcgtagattagattatacaaacatcgagtttccaagatgctgaagcaaaacaaaggcttaactttgtaagatgaatctacatattgcaaagcatattttacagatagcttgtttctagtttttattgctggatatttggtttttcactgtaggcttcaatttactctgaaatatcctatcaaatattctacaaaaagagggtttccaacctactgaaccaaaaaaaaaagtttaattctgtgagactaaatcacacatcgcaaagcattttcagagacagctttataaagatttattgcaggatatttggtttgtcgctataagcctcaatgttccttgaaatgtctcttcatcgattgtgcaaaaacagtttccaactttttactgtaggcctcagtgggctcagaaatgactctcaaagattctacaaaaagaatacttctaacctgctgaatcaaaacaaaagtttaactctttggggcaaatccatatatcaggaagccttttcacagatagcttctttcaagattttatcgtgaaatattcgtttttttctatagacctcactgggctcagaattgacccctcttagattctactaaaagagtgtttccaaaatgctgtataaaaataaagttttaactctgtatgatgaatctacacatcacaaagcattttcagatatagctcgcttctagtttttatcacgggatattctgtttttcactataggcctcaaagggctccaaaatgtccctttgtagattctgcaaaatgagggtttttaacctgctgaacataaacagaggtttacctctgtgagataaatccacacatcacaaaacatgttcaaaggtagttttttatctagtttttatcacatgatattcagtttttcactataggcctaatgggctctgaaatttccctttttagattctacagagtgtttacaacctgctgaatcaaaacaaggttttaactatgtgagatgaatccatacatctaaagcgttttcacaaattgtttgtttttatagggggatagtcagttttttactacaggccacaaaaagctcagaaatgtcttcttttagattctaccagaagagtgtttccaacctgctgtatataaatataggtttagctctgtgaaataaatccacacattgcaaacattttcacagatagcttgtttctagtttttatcacgggatatttggtttttcaccataagcctcaataggctcctaaatgtccctttgtagattctacaaaatgtttccaacttgctcgattaaaaaaaaaaaaggtttaactctgtgagatgtatccacacatcaaaaatctttttcacagatagagtatttctagtttttattgtgtgatattctgtttttcattaaaggtctcattgagctccaaaaaatccctatgtagattctacaaaaagagtgtttccagactgctgaatcaaaacaaaggtttaattctaagagatcattccaaacattgcaagacacttttacaaataggttgtttctaggttttatcatgggatatttaattttttaatataggcctcaatgggctccaaaatgtacctttgtagattctacaaaaagagtgttttcaactggctgaatccaaacaaaggtttaacactgtgagagaaatgcacacatcgcaaagtattttaattggtagcttgtttctagctttatttcaggataatcagtttttgactacaggcctcaatgggcttcaaaatgtcccctcttatattctacaaaaagagtgctttaaacctgcttaatcaaagcaaaggtttaattctgtgagatgaatccaaacattgcaaagcattttcacttatatcttatttctagtatttaatgcaggatattttgtttctcactatagacctcaataagctctgaaatgtcccctcatagattctacaaaaagagttctttcaacctgctgaataaaaacaaaggtttaactctgtaaaatgaaatgacacgttgtaaagcattttcacagatagcttggttctaatttttgtcgtgggatattcagtttttcaccacaggccacagtgggctccaaaatatccatttgtagactctacaaaaggaattattttggcctcttgaatcaaaacaaaggtttaactctgacagatgaatccatacattgcaaagaattttcacagacagctttttctagttatcatcacaggacattctgttttttcatacacttcttcatgggctctgaaatgtcccttagtagattctacaaaaagagtgttttcaacatgctgaatcaaaatgaatgcttaactctgtgagttgaatccacacatcacaaagcattctcttatatggctggtttctggtttttatctcgagatataaggtttttaaatgtaggcctcaacgttctctgaaatgtgtcctcttagattctacaaaaacagtgtttccaacctgctgaatcaaaacaaagttttaactccatgagatgaattgacacatcacaaagcattttcacagataacttttctagtttttgtcaagtgatattcggtttttcactagtggcctttgtggtctccaaaatgtcccttcatagagtctacaaaaagaatatttccaactggctgaatgaaaacaaaagttcatacatgtgagatacatccacatattgcaaagcattttcacaaataacttgttcctagtttttatcatgggaaatttggtttttcactatagacctcaataggctccaaaatgtccccttgtagattgcacaaaaagtgttttcaacatgctaaatcaaaacaaaggttttaatctgtgatatgaatccatacatcacaaagcatttccatacatcacaaagcatttccacaatcaaaacaaaggtttaactctgtgagatgaatccacatgctgcaaagtatttttgcagatagcttttttctattttatgtcatgggatatttggcttttcgctgtgctggtccgtgagctccaaaatgtccctttgtagattctacaaaaagagtctttaatctgctcaatcaaaacaaatgtttaactctgagagatgaatacacccatcacatatcattttcaccgatagcttgtttctagttttatcacaggatattcagtttttcactgtaggcctcaattggctacaaaatttcccttcgtagattctacaaaaagtgtgattctggcctgctaaatcaaaacaaaggtttaactctgtgagatgaatcctcacattgcaaagcattttcgcagatagcttgtttctagtttttgtcacacgacatttggtttttcactatatatctcaattttctccaaaatgtcccctcatagagtctataaaaagagtgtttccaattttctgaatcatgataaaggattaactctgtgagatgaatatacacatggcaaagaatttttacagatagattgtttctagtttttttgttgggatatttggattttcactgtaggcctcaatggcctctgaaacgtccccacctagatggtacaaaaggactgcatccaatgtgctgaataaaaataaaggtttatctctatcagaagaatccaaacattaaaaagcattttcacagatagcttgtttctagcttttatcatgggatattcagtttttcactaatggccctaatgggctctgaaatgtcccttcttagatcctccaaagacagtgtttccaacatgcttaatcaaaacaaaggtttaattctttgagatggatccagacatcacaaagcattttcagagatagattttttattgtttttatcacaaaatattcatttttttactataggcatcaatgggtgtgaaatgtccttttgtatattctataaaaaagtgtctttaacctgctaaataaatacaaggtttaattctgtgagataaatccacacattgcaaaacatttaaaaagatagctcgtttttactttttattgcagtatatttggtatttcactatgggcctcaatgggcttcaaaatgttactttgtagattttacaaaaagagagtttccaacctgctgaatcaagacaaaggattaactctgttagatgaattcacacattgcaaagaatttttactgatagcttgtttctggtgtttatcgtgggataatcagttgttcatcaacctgctgaatcacaagaaagtgtaactctgtgagatgaaatcacactttgcaaataattttcagaaacagctactttgtagtttttatcatgggaaattcaaattttcactgttagtctcaatgggctttgaaatgtcattttgtagattgtacaaaaagagtgtatccaatctgctgaatcaaaacaaaggtttaattctgtgagataaatccacacattgcaaagcatattcacagctaggttgcttttagtttttattgtgggatattggggttttcactataggcctcaatgggccctgaaatgtttcttcgtagattctacataaaaagtgttttaaacctgctgaatcagaagaaaggtttaactctgtgagatgaataaacacattgcaaagcatttttacagatagcctgcctccagtttttgccatgggatatttggtttttccatataggctgcaatggactccaaaatattactttgtagactctgcaaactgctgaattaaaacaaaggtttaactctgtgaaattgaatccacacatcacaaagcattttcacagatagtttacttcggtttcttactgtaggcctcagaggtttgaaatgtcttttctttgtttctacgaaaagtgtgtttccaacctgtggaatcatagtaaatgttaaactctgtgaaatgaattccagacattgccaagcattttcacagatagctggattctagtttttattgagggatattcgtttttttactatagacctcaaagggctcagaaatgcccatttgtagattttacaaaaagagtgtttcaaatttcctgaatcaaaacaaaggcttaactctatgagatgaatctacacatctcaaagcattttcacagagagcttgtttctactttttattatatatattatatatatttatacttggtttctcactgtaggcctcaatgggctccaaaatgtttcttcgttgactctacagaaacatggtttccactctgctaaatcagaaaaaaggtttaactctgtgagctaaatccacacatcactaagcattttcacaggtgccttgcttctagtttttattacaggatattttgtttttcaccctaagtctaaatgggctccaaaatgtcccttcttagattctacaaatacattgtttccaacctgctgaatcaaaacaaaggtttaactttgtaaggtgaatccacacatggcaatgcattttcagagttagattttttattgcttctatcatgaaatatttggttcattactataggtgtcaatggctgttaaatgtcccttcatataacctataaaacaagtgttcataattggctgaataaatacaaagttttaactctgtgagatgaaatcatacattgcaaagcattttcagacatagtttctttttagtttttatcgacgaacattcattttttcactataggcctcaatgggctcagaaatgtaccttcacagattgtacaaagtgtatccacttgtggaatcaaagcaaaggtttagttctgtcagataaatcctaacatcacaaagccttttcacagatagtttgcttgtaatttttatcgtcggatattctgtattttactgtaggcctcaatgggctctgaaatgttttctcctagattctacgaaaaaaagtgtttccaactctgtaagatgcatctcacattacaaagcattttcacagaaaacttgcttctagtttttgctgcaaatattcagtttttcactataggcctcaatgggctctgaagtgtccctttgttgattctacaaaaagactgtttatgaagtgctgaattaaaacaaaggtttaaccctgtgaggtgaatccgcacatcacaaagcattttcacaggaagcttgtttgtactttttatcgtgggatatttggtttttcactataggcctcattgggcttcaaaaagtattttattagattctatgaaaaacatgtttccaacctgctaaatggaaacaaaggtttcactctgtgagataaatacacacattgcaaagcattttcacagatagctttttttctagtttttatcatgggataatcgatttttcactataggcctcaatgggctttgaaaaggccctttgtagattctacaattaaagtgttttcaacctgttgaaacaaaacaaaggtttaactctatgagataaatccacacattacaaagcttttcactgattgataggttttttctaggttctatcgtgggatatatagtttttctttttctttttcttttttttttcaggggacggagttttgctcttgttgcccaggctggtgtgcaatggtgctatctctggctcactgcaagctcctcctccccagttcaagccattctcctgcctcagcctcccgagtagctgggattacaggcatgtgccaccacacccggctaattttgtatttttagcagagatggggtttttccacattggtcagggtggtcttgaactcccaacctcaggtgatccgccctcctaggcctcccaaagtgctgggattacaggcatgagccaccatgcatggcgggatatagagtttttcactgaatgcctcaatgggcttcaaaatgtcccttcattgattctacaaaaagagtgtttccaacgtgctaaatcaaaacaaacaaacaaacaaaaaaaactttaactctctgagatgaatccacacatcacaaagcattttcactgatagcttgtttctagtttgtactgggaatatttggtttttcactatagaactcaatgggctccaaaattttcttttgtagattgtaaaaaaggagtgtttccaacttattgaagcaaaagaaagatttcactctgtgagattagcccacatatcgtaaagcattttcacagatagcttgcttctagtttttaccaccagatattctgtttttcactctaggcctccatgggctccaaagtgtccccttgtagattctacagaaagagtgtttccaaactgctgaattgaaacaaatgtttgactgtgtgacataattttacacatcccaaagcattttcatggatagcttgtttgtagtttttattgcaggatattcagtttttcactatagacctcaatgtgttttgaaatgtcccttcttagaatctacaaaaaatgtgcttccaaatagctgaatcaaaacaaggttttaactctgtgagataaatcaacatgcagtaaagccatttgacagatagctttcattaagtttttattgtgggatattctgcttttctctataggcaccaatgggctttgaaacgtcccttcataggttctacaaaaaaaaaagtgtttacaggctgctgaatcaaaacaaagatttagctttgtgtgattaatccagatatcacaaagcatctcactgatagtttgtttctagtttttatcgcaggataatttgttttccactatagtctcaattggcttctgaatcaccctggtagattctagaaaaagagtgcttccaaacagctgaatcacaagaaaggtttaacactgtgaaatgaaaccacaaatcggaaagcattttcagtgatggcttctttgtagtttttatcacgggatattcggtgttacactataggcctcaaagaattttaaatgtcccttcattgattgtacaaaaagagtgtatccatccttctgaatcaaaacaagcgtttaactctgtataacaaatccacacaccctaaagaattttcaccttatcccccagcaaggaaactcttgttctcccagcttctatcggagggctgcatgattcctgtaggatgagaaacaggcagccatgtctggcttttacctggtaatctaggctgtttcctttcatctgcccatcctctctcattgtagagggggtctttcactgggctgttgctgggtgggactgcctctcactggggatcttttgtctgtcacggatttcagagagcaaaagggatttcaggtaggctggctgcgctccaagttgtggatagcgatctcattgagggggttgggttagtttgcactttgcaggagacttttgggtcttctgacaggaatccttgaacatggcttggactccagcacaaatccgcttgttctcccaggcaagcgttgatttttctttgctttcatggtgggtccacagtgcccctcaacagcactcctagacaccattttcaggcttgcaattgccctaaacggcctctgagacaccctctcaacgtcatctgcacccgtgagatgctagttcgaggtttgagaacactgcctcacctcggacttgcctttgtcatggttcctgccttctagagtgccctgctgagaagcaggagcccctgcaaggcccagaatgaagggacgtagtgagctcaagggcccggccatcttccactgacccccgcctctggggtctcaggtatgattccatcacgtggacacccgtcaacaactcaccggactgtattttcattcccatgcgaccggattcttgcacacagcctctttctggaacagagtcagaagagcaatttccagcacccacctcacagtttcgaaacgcctcctcctccagcgggacccgacctcagagacgtgccgaggaggccttattgtcgagacatttagggtcccgcagtgggttgtcgcgggcagcattttcccgagaccaggtgcgctctgcctgcaccattttcctctgcttaggtaggctgacagcactgacaacccggcgcccaagactgcttcacgaatgcgaatgcgtcagtctctaggcaccaggcgccagtggtgagcaatggctcgcgtcacagtggccaccgttgcctggagacaactccctgcggcttggtggaggagacctctgtggacatgcattggtgttggactctcgcctgtgctctctgggggatccacgggatagtcccccgattctaggaactggcagggggaagcaagcctaaagaaacatctagtgaagcttcaggtataaatcgcgtaatttctaaggatccaaaaggaactgcaggatgcgccaagcatgcctagtggtctccttgaggggtctggggtggtttgcagtttgcgggaggcatctgggtcctctagctggaatccttgaacgtggcttggagtcaagcacaagtccgctcgttctcccaggcgggccttgatttttctttgattttatgggggttccacagtgccaatgaacagaacttgtggacacccttttcaggcttgcaattgccccagtgggcctctgagacactctctcaaccttatctgaacccgtgagaggccagttcgaagtgtgagaacactgctccaccttggagttgcctttgtcttggttcctgccttctcagagagccgtgctgagaacaggagtccctgcgaggcccgggatgaagatcttctctctggatccggaagaatcataatatttatcaactctgtaaactctcgggaaagcacttgtgctagcaaggtaacctggcctttgtgaattcatgcactagtctccatttctgggaagagcttcagcaccagcagcacataccactgtgagggcaagtgaaaaagtatcactttgggtagatggatataatcctcccgtaaagcttcatttgcaagaaaaccactatcacccttttccacctgtggaataaagatccttcttacatgtccaagatcacctgtgtttaacatatttatgttggctccccagtcatctccgtcttgttcacaggcagtatttgggattgagattcgagatgtaaaagtaatactagattttgtatccctgtgacccaaagacattgaatgaatatacctcaagccctggctaccttgcaaaaggagagccttcaactctgcttctttaaagtaatttatgattctgcagttttcattcacttcagtatcagctaaatttccaccatgacaatattcatcctgtgtaagcataggaccatcttctgcccagacagagaaatacggaactgcatgaggaagccgtccaggcactgcagtagagcctgtgctcctctcagagttctttgctcactgcagagtcggcttaaggctttcctgatcacctaatgtggtgcatgcacccatgctgcctcttcacacagtaaacacagaaccaaaacctccagagcaactttctgcagctcctgaaactgctgtgcgccttaacctcgctttgctctcagtcactgcagttctctcagcaggccacgtttcatctcccagctcctgagcactggcttccatgtcttcactacaacaatcatccccatacccccaacagaatccggagtgaaagaatccggagtgaaaggatccgaattcacttgaagtctgttgcacatccaattcccatttcctgatttttctgtatcacgaagaagaacggtcccagagtttaacagggctgggatcaattcttccagctctggagagaaaaaccgggagtgcaagtggcgggtggcagaggcgaagcttgcaggagatccactgggacccccgggatccctcagcgcccagcagggccctccccgcccgggcccccacagtcctgcgaagcctccccccagtgcccccagcactcgccagaaccagtagcccaggaagcaggtgccgctggccaccaggagcccaagtaccctccccgcaccagtcacacagagacccgctgccaggccggtcagcgcagggcagggccccagaagctcctcaggctccagctccaggggctgctgggcctggcgggcaaggttccgctcacccccagaaaaggagacggagacccacaaggacctcagcttgtctggtgctggaggcctgggctgtcagaatgcctctccgccttccggcaggcgggagccgcatgcgccccctagtggccgcggccagaagctgtcacatcccatgggcgcaggcgcctcagccccgcaaggggcgggctggaggtgccactcccattcatagaccaggaatcagagccctgggctggaagagtctggtcaaaattcttccaaactgagtggggacagagaccaactcacccccagctgcagtgtatgcagtgtagacagatctggactttagccattcctgagcccccccttgcctcacccgtacatgcccggcccacctttcccttcctcgccaggaccccacatccctccctctgagtcgcttcctctctgaaacaaatagtggtgatagcgagtaacacatcagtaacaagaaactagcaggtgctcagtaaaatggtctaccctggcctcttccacagtcaagtgagcattaacaggaaaatgctcattggaagtggagagtcgccggcagcccctccgcctccctccggcttggccttcccgcagagcaaactggggcccagaaagggtgtgggcgaagaccctgtcacctcccagcagggggcgtgctgcccgcggttttcgggatcctgggcgtggagccatcctcacaggaccctcagaggtggagaggagaaagagcacactcatttgacaggtgcagagactgaggtccgtggggcaggggtgagcggcccagggcagccagacctgtgaacagtagagctaggattccagcaggtccccagccagtcactgggtgagcccctgttgtgtggggatcactgaggtgcaggcattctgataaccaccggcttgaggaactcatggtgctccatcctgaattctggggcgctttctaggatacaatatggtaaaggttgtgtaacatgtgtgaggtccagcatgtgcacgaagcaaacagggatagattggggtggtagtacagggacagaatcacagttgggacccttgagaaggcagttggaatttttctgccagagcaggagaaaccctctgggcacccaggctggcatgtgcaaaggcgtagaggcaagctccccctgacacacggctggaggggaagctctaagtgctgcgcacaggctgttcacactgcatccttctccctggacttgctccccccacagcacctccatccttccagttagctatccaggccaccaccctcaccctctcacacccacatcctgtgggccccacatttgagagacaagaattcagttgcttctcaccctccatgggtgctcatcacctggtctgagtccccatcctctctctccccatacttggtctctgcttccatccttgactcctgacgtctaattgcaactcaatactaggtcagatcatgtcacacttctgctctggtgcaagaattatgtggttccttcagttcagtgtccaccaggatttgatattcccaaggcacatctctcactcctttgttctcattttaccttcacacaggaaaacactttttcttcttgaagtgtgctgttatgtagctactcttggcgatgaaatctctgttattacttttgaaattattttaattgtctttatgccctaaagatatttagctatatattcaatgctagcttgaataataatttttctaagcatgcgttttgactttttaaaatttaagatgacattagatgattttattatgtacatcatgatgttttgaacattccacatatagattgttgaatggttaaatctaactattaacaaatgcattatctaagatcgttatcatttttgttgtgagaacacttatcatccactatcgttgcaattttctagaatgcaatatatcatcagtaactgtagccaccttgctatacaatagaattattgaaatttgtttttttctatccagttttaattatgtgccctctgaccaacatctccccatcctgttcccctctctaaccactccagcctctgctcatcgccattctgctctctacttctatgagaccaactagtttagatccctcatatgaatgagataatgcagtatttttctttctgcacttggattatttcacttaatatactgtcctccaggatcatccatgttgacagtaatgacagcattttattctgttgtatgactaactaaatatcattccattgtatctgtttatgtaatacatacataaatgtatgtatacaagcatatgtagatataccattcttcaaatatattattttgcatttatttttattaaaagtatatttctcccttatctaaatgctgataaaaatatgaggtattttcagtccttcctcttaataaaagccaaagttaaaggtctgtttccctgttttttaataagattctatttcttgctgatttttttgagttccctgcacattctgcatattactgcttaatcgtaagcatggtttggattttttttttcctttctgtataatgtctgtttcctctgtggtttatttgttttctttgccaaaactttttattagtttaattcggtcccatttatttatttttgtttttgttgcatttgcttttggggtatttgtcataaattatttatctaggccaacgtctggaagagtttttactaggcttttcttctagaattgttatggtttcaggtcttagatttaagtctctaatccacctggagttcatgtttggatatggtgagagatacaaacacagtttcattcttctacatctggccacccaattttcccagcaccttttattatgtatgtgtatgtttttgtctaatttgtcaaaggttgttattgtttggctgtatttgttagattctctattctgttacattgttgtatgtgtttatttttataccagcacaatgctgttttggttactgtatccttgtagaataaattgaagtcaaaggaaagacaaaggaaagttgttgtctttcctttattttgaaggagagttttagcaaatataagtgttcttaattagaattttttctttcaatactttgaatatgttatcccctttggccctggcctgaaagaagaatttgagaattgcgctgatagttatgtgatgagtagattttctcttgctgcttttaaaattcactttttctctttgacttttgacaactttattaaaatatgtcttggtgtaaggttcttcatgttcaatctacttaaggactcttgaacttcatgattctggatgtccacctcccacctcaaattcagcaaattctcagtcagtatttctcaaaataagctttctattctttcctctatttcaccttcttgtatccacataacgcatatattgctttatttgatgatgtttcataagtctcatagattttttttactctttatcttttgctatttttttttttgttttttgcacctctgtcaggataatttcaagatagctgtttcccactttgccatttcctcttcatgactgaacctgctgttaaaactctctattaaatttttcagtttagtcattatattcttcagcattaacatttctgtgtttatttttatcgcttctatttattactgtaacttctgattttctttatgtattgctttcctaattttgtttagttgtctatacttgttcccatatagttcactgagcttagtatctaaaataattacttccaatttttaaaagcacattgtcaattcctatttctttggggtctgctattgaagcttttttgctttacttaaattgtgtgatattttcctgattcttcatgattattgtggccttgtgctggtatacatatttttgagaaggtggtcactttttctagtctttacaggttggcttcagcaggaaaagttcttcaccattaagtgtggcctggtgttcttgttcggtcaggtggttgagcctgttgatggatttggctgactggcggtgcttcagggtcagaaatgtctgctggttttaatccctctgatttggtagctttgttgggtgaggccacttgaagcactgtggggcacattgagatttgcatgtaccagtcactgagtgtttcaccccatttctttggtgctagttatcttcatgtggtctaagtattaaaattcttccagcgtttgttttgaggcaaagcagaagtttgtccatcaggcagcactccccagatagacattgaatatccactttgatctacttttctcccactggaaaaataatgggctgagggtatacttctcagcacagtattgttctggatatggaagtggtaaagcaaacaaagtaaaatcattcctcttatcctttttaatgagtctgtctttgcttttgagctctttttgggttttgcaatctcacagtggtatttggagttctcacaaaagcattctttcctgtgggtagttgccaaatagatgtctctttgagggaaacagggctgggaacctactattccaccatcttaccagactccctctacatccaaccacttccatctctcaatctctcagtaatttgtaaaataggaaaatacaaacatgtctagaaatcattactaaaactaacagatgagttgagtgaagccacagtatataagccaaatgtgtaaaaaagtcaatgtgtatttttatagactggcagtgaaaatcaaaccttaccctgaaaaacctgaaggaaataccgaggaaaattaaagaatacctacataaatagagctatcatgttcacatgtcagaatattcaatataattaatatgtaaattttccccaaattaatacgcagcatcaacacaattcagtaaaatttcaacaaagggctttgtaaaatttgataaaccaattcttaaagtactttgaaaatataaataatctaaattagtgaaaacaataatgaaaaacagtcacatttagagacatatctgaaataaatactataaagctacagtattcacaacagtgtgttgttacttgaggaaataattataaataattgtaatgatataggaagctcagattatatatatatacacacacatataaacacacacatatatgtgtgtatatagatgtatatatttacacacatatataattttttattaaggaatgcatgaaggcaattcaaagggaagaatagaaatttacataaatattctcggagaagttgaatacccatatgtaaatatgtgaacattgattaatcaaagtacatctgaaaaattaacttcaaatgaatttgagatgtaagtgtaatagataaaagtatatattttgtatgaataaagcataggagaaatttattgtgaccctgggataggaaatggtttcttagatagcctacacatgcagaaaacataaaataaaatgtataaattgagtcttcatgagacactgttaaaaataaattgacaaccatagcctgagagaaatattgaaatacatatatttaataaatgttggtgttcagatttgtatatacataaatcatacagctccgttaaaagaaggcaaatgacctgacaaacattaatgggcaaggtccattagctgctgatgggtaaacacattgcggcgtgcccatatgatggactatttctcagcaataacaagtaagaaattaatgatatgtacaacttggatgatttcaaaggaattattatgaattaacagaagacactaaagactacataaatgttaaaatcgcaattatgtgaaatttttcaaaaggcaaatacagtagctaaaatataatagttttgtcatgggcatcatgtataaggagagaatttaatgaaaaggaccagattgagcttttcatggtcatgggaatgttctacaacatgtttgtggtagtgattatacagtcacatgcattttgaaatgaaaatgtataaaattttacaaattattcatttataattgatgaattttaaagaatgtaaattgaacctcaataaaattatttcaaattatgctatggaagaatgtgtgggacaattggagcatgctcaaaacatagtgaatgtctgcaatcatttagaaaaactgtattttagtatttatttaagccaaacagatgctctccctgtgactaagcaatgttcctgtaaatatatataccacagaaatgtatccttataatcatggcacctttctttataatggctaaaacagggaatgtatccaaatgtttgtcaacagtagaatgaataaattctaaaatatttggaaagaaagctctcaggacagggcagagtgggataacatattcaaagtattgaaagaaaaaattctaattaagaacacttatatttgctaaaactctccttcaaaataaaggaaagacaaaaacattcctttatctctcctttgacttcaatttatactgcaaggatacagtaacaaaaacagcattttgctggtataaaaataaacacatagttcaatggtacagaatggggaatctagatatatagccaaacaataacaacctttgacaaatcagacaaaaacaaacacatacataataaatggtgctggaaaattgggtggccacatgtagaagaatgaaactcaccatatccaaagattaactcctggtagattagagactaaatctaagacctgagacagtaaaattctagaagagaaacctaataaaaaactcacaataaatcacagaggaaacagacattatatagaatgtgaaataaattccaaactatacttacgattaagcagtaatatgcagactctgcagggaactcaaaaaaatcggcaagaaaaaagaatcattaaaaaatggggaaactgccctttaactttggcttttattaaaaggaaggcctgaaaagacctcaaatttttatcagtatttagataagggagatatattttaatgaaaataaatgcaaaataatatatttgaagaatggtatgtctacatatgcttgtatacatacatgtatgtacatacataaacacatacaatggaatgatacttagtcatacaacagaataaaatgctgtcgttactgtcaacatggatgatcctggaggatatattaagtgaaataagccaggcacagaaagaaaaatgctgcattatttcatgcatatgagggatctaaacaagttggtctcatagaagtagagagcagaatggtggttaccagaggctggagtggttagagaggggaacaggatggggagatgttggtcagaggtcacgtaattaaaattagatagataaagtaaatttcaagaaatctatcgtatagcaaagtggctacagttactggtgatatattgcattctagaaaattgcaacgatagtggatgtgttctcacaatgaaaatgataactatgttaaataatgcctctgttattagctagatttagatttaaccattcaacaatctatatgtggaatgttcaaaacatcatgctgtatgtaataaaaatcatccaatgtcatcttaaattttaagaagtcaaatagcatgcttagaaaaaatattattcaagctagcattgaatatatagctaactatctttcttggtaaggagtattaaaataacttcaaaagtaataacacagagatttcattaccaagagtagctacataagagtacacttcaagaagaaaaagtgtcttcctgtgtaaaggtaaaatgagaacaaaggagtgagagacataccttgggaatatcaaatcctggtggacactgaactgaaggaaccacataattcttgcaccagagcagaagtgtgacatgatctgacctagtattgagttgcaattagacgtcaggagtcaaggatggaagcagagaccaagtatggggagagaggggatggggactcagaccaggtgatgagcagccatggggtgggggggtgagaagcaactgaattcttgtttctcaaatgtggggcccacaggatgtgggtgtgagagggtgaggggggtggtctggatagctaactggaaggatggaggtgctgtggggggagcaagtccagggagaaggatgcagtgtgaacagcctgtgcgcagcacttagagcttcccctccagccgtgtgtcaggggaagcttgcctctatgcctttgcacgtgccagtctgggtgcccagaagacttctcctgccctggcagaaaaactccaactgccttctcaagggtcccaactgtgattctgtccctgtactcccacacctatctatccctctttgcttcgtgcacatgctggacctcacacatgttgcacagcctttactgtattgtgtcccagaaagcgccccagaattcaggatggagcgccatgagttcctcatgctggtggttatcagaatgcctgcacctcagtgatccccacacaacaggggctcaccctttgactggctgggggcctgttggactccttgctctactgttcacaggtctggccgccctaggccgctcacccctccccgacggacctcagtctctgcacctgttaaatgggtgtgctctttctcctccccacgtctgagggtcctatgcggagggcaccaggcccaggatcctgaaaaccgcgggcagtgcgccctctgctgggaggtgacggggtcttcgcccacaccctttccgtgccccagttggtgctgggggaaggcaaagccagagggaggcggaggggcttccggtgactgtccacttcctggaaagtggattcattttcctgttaatgctcaccttgactgtggaagaggccagtgtagaccattttactgagcacctgctagtttcttgttactgaagtgttacccgctataactcctatttgtttaaaagaaataagcgactcagagcgcggggtgtgaatactggagaggaagggaaaggtgggctgggcatgtaccggcgaggcaaggggggagtctcaggagtggctgaagtcctgatctgcctacactgcatacagtgcggctggggttgagttggtctccgtccccgctcagtttgggagaatcttgaccagaccctgccacccgagggctttgattcctggtctatgaatgggggtggcacccccagccctccccttgctggtctgaagcaccccctcccacaggctgtgacagattctgaccgcggccagaagggggcgcgcgaggctgccgctggccgcaacacagagctgcattctggcagcccaggctctagcaccagactggctgaggtctctgcggctcttcgtctccttttcggggggcggagtgagcggaaccttgtacttcaggctcagcagccccaggagctggagcctgaggagctgctggggtcctgcccagcgctgaccggcctggcagcgggtcccagtgcgaccggtgaggggagggtgcttgggctcctggtggccagcggcacctgcttcctgggccactggttctggcgagttctgggggcgcctgggggaggcttcgcgggactgtaggggccccaggcggggagggctgtgctgggcgctgagggatccgggctccctagtggacctcctgcaagcttcggctctgccacctgccacttgcactcccggttttcctctccagaactggaggaattaatcccagctctgttaaactccgggacggttcttcttcgtgatacagaaaagtcaggaaaaggggaattggatgtgcaacagactccaagtgaattcggatcctttcactccggattctgttggggtcatgggggtgattcttgtgatgaagacatggaagccagtgctcaggagctgggagatgaaacgtggcctgctgagagaactgcagtgactgagagcaaagcgaggttaaggcgcacagcagtttcaggagctgcagataattgctctggaggttttggttctgtgtttactgtgtgaagaggcaggatggatgcatgcaccgcattaggtgatcagaaaagccttaggccaattctacagtgagcaaagcgctctgagaggagcacaggctctactgcagtgcctggacgtcttcctcatgcagttccgtgtttctctgcctgggcagaagatggtgctatgcttactcaggatgaatactgtcatagtggaagtttagctatgctgcagtgaaaactgcagaatcatgagttacttcaaagaagcagagttgaagggtctccttttgcaaggtagctggggtttgacctatattcattcaatgtctttggttcacagggatataaaatctagtactgtttttacttctcgagtctcaataccagatgctgcctctgaagaagaggaagatgactggggatccaaccaaattatgttaaacacaggtgatcttggacttgtaacaagcatctctagtccacagtttgaagagggtgataggtgttttcctgcaaatgaagttttacaggagaattatacccatctacccaaagagatgtgttcctgctgctgaacctcttcccagaaatagagaccagtgcatgaattcacacaggccaggttaccctgataccacaagggctttcccaaaagtttacagagttgataaaagttatgattcctccagatccagagagaagaccttcaagcaatggccctggtaagcattcggtactgctgtctgcttctagaaagagagaagaacagtaacaaatagaatcgaagcctggaaagttcaaaaatttgcttttagaaggataactcaaggaagcacagatggcagaggctgcagctgaagcagagcgctctgctggcgggacagccatcgtgtccagcacccagagtaatgggccattcagcctagtggaaggcacatgagctgctccatcaaccttcctgcatactcacctactcatgtcccacctcttctagaaactgtgacaaaagggagctaggttgaaatcactgctggaatcccgtttgtaatgactttcactcttggtgtcagtagttttactgcttgggacttttatttgtgaattacagttgaaagctgcatttttacctatgtcaggctttcatctggccttaccagtctttcctctgtaggatggcagtcactgttggatattacaccatcctgtccagggctagccactgtggtggtgtgctgcttatagcttgctcttgtattgtaataaaagatatctttccctgtcgtgatttgtaagaagaactcaagggcattgttacaaaaatattctcccttcaaaaagagaaaagctaaaagactcattactactcagacttcaatacacctgtgtgtcaatcttatatttctttttttatacaaaactgtaaaatatacttttaggtccaaaagtatacttttagtgctttgtaagcattgcgtgaagcctgatatgataattccatggaagcattgccttgggaatttgctgtctttgctgtaagcttgtagcattaaacaaacattgtagttaataggctttctctttgaaacaattatgtgaaatgtacagctgttcttgaggaactttgaagctagttcattgaaaaatgctcctttcccttcccttgtaatgctatattaatgaagtataataattactggttttgtaattttttttctggtaatgttcttctctgactctttaaaaatgtcccttccctcctcccaagttttatactagactgtggttagtctgattctaaatgttttacttagtttatcctcaatattcatgtatataaattgatcctggtgatcctgtacatggctgtttgcaatgccagaatgatttctgacattccaggtttttcacaaaatatattttatttgtgattagtcacttgactaataatatcagctaaaagatgtcacaaaaaataaaataaaaaaagtggctgggctcagtggttcacacctgtaatcccaggactttgggaggctgagggaggtggatcacgaggtcaggagatgcagaccatcctggctaacacggggaaaccccatctctactataatacaaaaaattagccgggcgtggttgcaggcgcctgtagtcccagctgttcatgaggctgaggcaggagaatggtgtgaacccaggaggcagaacttgcagtgatcggagatcgcgtcactgcactccagcctgggcgacagagcgagactctgtctcaaaaataaaataaaataaaataaaataaaatataaaattaaaaagaatttgtgtcttgtttgtttcctcattaatgttggttgaaagcatatttgcacttgtctttgacttgcattttattaacatagattggcatattaaaagtccctctgagtttaccttaattgtctaaaaaaatgtaagaaaaagggcctgtgggaaggacaaccaggcagaggggctagtgtgagcacatgctgggcaggagggaagagataatgacgcggaccagggaaatccccaaacccagcaagtcagggagccaaatgaaagcctttcatcctgtatcggccacctaaccccatcgacactccaagtgagcattctcttttagagatactcattgccctgttttttttctgtaatcttgtaaaggaatctgatttctcccattagactttcacagtactaaaatttcacattagaatgctattctttagaaggcaccttcctagactaggctgcaaggagactgaggaagttactgtcagtcacttaaaccccacagggacattaattcaacagagctttggtgggggagtagaggagctcactgcaggcaggtctggatgctgcacagagtgtaaagggagcagaaagacccaggacacctaggcctggagatagctccaatcccgggaggtactgttattatccccattttacagaggaggaaactgagacacaggcaggtaatatgatcaagaccacgctgccccacagtagaggagccaggatctaaacccaggcagcctgccttgctatcagagctctcacccataacctcatgctgctgttaagcaggattgccctgtggccagggtcacagcctctgggttcacattctagctgctctaccacttcaaggtgtgtgtccttgggcaagttacttgtctgtgctcagtgtcctctatacagtgggtgtagcagtacctgcctcatggagtcccttaagtgagttaatagctgtaacatgcttagaatggtgtcatgtccatcatcaccatccactacatataggccatcatacctgaatcccagatggacacatatccttgaagggtctaaaatccaggatcctgaaatacctggaagtggtatcctgaaatcctctggcagcattctaacatcttttgactgcagaattgtaccctgcttcccagggctagaaggtgtggggtaacctgctacccagttcagccccaaagtaggaaaagaaagttttgtcacaggcttgtctggggcccagcccctgtaacctcccccatccctcctttgcatgctccctcacccagattcacacatgcactccaggtcttctgggcccaaagggaaggagagagggtggggagtgggttcactggtccactggagcatgctgcctccagccctgctaaactggtgggtccagggaatgggcctggagctgaaggggtcttgatctccctttaactttaagccttcatttgcagtgacccaagagcttcacttcttcctgtgagcctgtctggatgtttatgctggatggcacgggccccttctggcagggctgcaaaggtcagggcctggctggcagccatggcaggtgaggagaccttggcagatgagaagaccttctgcttcagcttcaatgtatgggtcttctcctagctctcagtacattcctcctgagccatgattggccccagttcaatgacaccttctgcggcagcatcatggtgtccaggggtataatctgtagcatgtgccagtgctaccccaaggtatatggtggtggggctgagtggagccagaagggctggatcttgttcctctcttccgtgtatgagccccatccttcaatcatcttcttgttcttttcattttgactccctgttttattctgtcttctcttctgagtatccatccattcatttatccattcatccatctattcatccctccattcatttcagcattaatctatcaatccatgcatccatccatttatttatccaaccacccatccatctatctgtccatcatttagcataaagattgatcataagcctcctggttctggagccatggaccagacaccatggggagacatgatgaaaaagaagatataatttgtgtgcttgaaacaaaagttaatgagtgcttaccacctgcctggcagtcctgcattcagggtgcagttctcccctcatcctgagtttttggtaccttctgtagtttcattttgtagtagagaatgctgagcctcacaatatgtggtcactcagctgcatagtggagtttagattggagctcagatgtgtgtgacttagacatcaccctctgccttgagtcctccactccagggtcccagagctgctgagcattctggggttggtcagctctaaccttggtggcatgcattgagcaactctccatattttggagtcttaatgtattcttagccttagtgatggcaaggaccctgctttgggagacctgggttctagttccagttctgtcccaaacttgctgtgtgatctttgtctttctgagcccagtatttgcatctgcacaataggacacaagcactaattttcatagcctcatagggttgttgcagaggtcagagaagagaagagacatatgaatatttgtagattgtagagtgttttgtttaggtgaagggctgtcagatcctgataaccctctggaatgaagatgtcagaaattgtaaaccttcaatgcccagagaggtggagtgactcttccaaggtcacatagctagtcagagacagacctaggggaaaaaagaagagaaacatggattctaacttgggctctgtctctaactgcctgggatactgctcaagctccttccctctctgggcctcagttaccttgttagtacaatatgtgagacaggatgaggggatggaagatggagggagggacctgctagagctcacctctacggcccaggcttgggaatccccagaacccccatattgtcctttacacctgggtggctgtactcaagggctcagggaggggggactcctgtggccctggactccctagccattccccttctgtgggcccaccctaggctgtcagcgtgttaggtgctggaatggtctgagctggtttgtagtcatttccgaggcagtttatggtcgcctcacctctgtccatgccatgtcctgagcagaggccccagagagaagaagtcctgggggccagagccacccgtgtcaccactagccatggtagtcctcttccccgtgaggagggtgcaccctgggagatggcatcgggtggaacgaagcatctgtcctgacctccctgttaaccagaggtggctctggggctctgggcagggatacaggagtggcagtgggaagcaaagtggaggaggaaatattgctggatactaatgagtcacagttgatagattcatgtcttcatgtgctgtggaggcagtgtggtggggtgcagatggcgtatgttttggtgacctacaggcttacattcaaatagctgttacctcatgttccacatctgtgaccttggcaggggaagctcctcaaccccgaaccttgcatagctgagtgggagaaaccagaagggtcttgtgttgtcggggacctggcatcatgcctggcacagagagtttgcaaaatcttcattctcaagattggcatttgtagctctaggggatacacacagaggtctctgtatgtatgggcagttacatgtggataggtgtgggtcggtttgtgtgtgtgggagtgcatgtttcagggacacaggctattcaaaccagcacaagttgactctaataagggaagggaggaaagcgcatggtaaaccaggaagacgctctagagatgaggcttccggcacccctcatggcctcttggtgcctgtgccattgtagccttcggtgctcatgcatgtcctaccctcagggtcctcccttggacctcagtgcctggcctgtggaaagcttcagtaaatggggaaacataaatataagggaatataactagctaattagggtaattaagtgaggagtagccatttccaacatacattaagctgtccctgatttttaggggctggaggtctagtgagagagacaatttgctgcatgatggggaagaagtaggattcacagagaaggtgagtttggctttgtaggttaagtagaaattcaccaggcagagaagatgtaggaagacacttcaggaagaagagcaacaggatcaaagccatgtggtgaaaggagaaggcaagtgggtcagcaatgctactagagggggaggagaacaagtcaaggtggaaatggaggggccttagctcctcagtgcctggggtgtcatgctaagaaatttggatcttaccctttagttgataggacaagggaggggcatgaccaggtttgcagtttgagaaaattatcaggctgatatctggaaagaggaaggtctggggcagcgagaccaatgggaggcttctctgctcaggtgagagatggtggtcatctggattagggagaatttgaacccaaggctgtagaaactgagaagacagttccagtttaccatatgtggagtacctgctgtggctggcagggcaccagcacttctacccaggttatttcattaaaattctaaagtagacctggtcagctctggaagccacctgggcctcaggcatgagagaggagaaggaattggggcaaatctagtgggtgggtgcagctggagatgctgagcctgttaccaaagatgggacaggaaagtggggagcagggaaaggagtggaagggagagtgaggcctttccctgcctggctgaagcccttacccataagcctcccattcctcattcctgccagatctgctggacccaggaccaggaccctggttggtgttaaaggttctgtctcccctgtgggcctccctccctctgcttcttccttctgaggattgctcagtgttctgcctaaccataaatctgacggcatactctcctgctgataaatcttcaaggatgcctctgattctgggcaaagcctgagcttcttagttttatgttctgggggtctgcattctttgatatcccctccccagcttcaactctgccttttcctcctcatcaaagtacatgtattttaatatgctacctcctctccttttcctccaagattttcataattgtggttgtgatgatgatgatgatggtgaggatggtgatggtgaaggtggtgataatgatagtgatagttaagttgaggatgatggtgaggatggtgaaggtggtgataatgatagtgatagttaagttgaggatgatggtgaggatagtgatggtgataatgatggtgatggtgaggaagatgacggtgaaggtggtgataatgatagtgatagttatgctgaggatgatggtgatgatgatgatgatgctgagaatggtgaaggtgagtatggtgatggtgatgataaggatggtgatggtgaggtgataataatggtgatggtctggatggtgatggtgaaaatggtgacggtgataatgatgatgatggtgatggtgaggatggtgatggtggagttggggatgatagtgataattatggtgaggatgctgctgctgatgctggtgagaatggtgagggtgagactgatgatgataatgaggatggtgatggtgagtatggggatggtgatgatgcaccccttgatttggcaattcgacatctgagaattgttcatttcttctagggttttttttgagtcaagacttccctacgttacccaggcaggccatgaactactggccactagtgatcttcccactttggcctcctgagtagctgtgattacaggcatgaacagtggtgcctggttttatcttaggaatttatcctgaggatataatcagacaagtgtgccaagcggtacttagagaagggtatttattgttgcattgatgatagtaggtaagatgtgggaagaatgtaaatgtccagcaataagagattggccaaataattgtgctacagctaggcaaggggctggcttatggccattcaggacacagaccctcctgattgagtcaaacctcctgtcactgctctcacacacctccctccttttcagcacaaattaccatcataattttacatttctttgtgaacctctttgatgactttctgtatccctcattagttgccaagctccatggaggcaaggagtatactatgctcattattgtgtcttccgtaccaagttaagttcctggaacacagtacactctcaataatttgttgttaaatgaatgactgagtccatatttcttagtatggaaagatgtttgaaatatgcaattaagagaaagagcagattataaaacagcatgcatgctgtagtacacactgcaaattccctcctttcttgatcttctttgggggaccaaatgtgcactctcagtcaataaattatgattgccccttgcctagctgtagcacaaagtcaatcatgacaatgctattctctgatgctagggttggtcatgagatcaggttctggccaatctaaacacagatttccagacctaaagagaaatcctctggtggtcacctcagaagttcttgcttttctaataaaaatgtagaagtgactgcttttgctggccttggaaacacttgtagtggttggagctgcagcaaccatcttacagccatgagctaaattccaatagactcacaaagatgctgggcctaacattgttgaaccagtgcaccatagccagggaccatagatactctaactatgtaagaaaaatgaacctgtatttgtttaggtgactgaactttcagattaacgcactcccaacagatacagagcatgatcccatatatacctgtatgtgcaagtatgaatagaaaaataattaaagtgattatctctgtgtggtaggattctccttcatattttttattttataaagttttcccaaacggcgtgtaaataataatcaaacacatatttctgtacattcagaaaataaacaatggtactaattttattttttaaaaataaacaaaatattggggctccagaaggtagttcactaccatatgataagttaattagccacaaccgagaagaacacttgtgggtttcctggatgacaggttcggcagcagtgagaggtcccctccagaacagtatgtggttccaaactcctgagggcagcggggcagaccccagggaagtagatgagaagctgagtgaggctctgtggggagagaggatgttcctcagccctcacaaggacatgtcagtttcacttgagattaggccctggccttggctgggcagcatgctaggcaggttctcagcagcatggggtgataacaggacgaggggaagcctggcatgctggggcagctctggggtcctcaggtggggctgtctcgggcagcaactctgttggctgtaaacacagatttctaggaggcagagcattgcaatctctcccaccataaacctggaccatcagggacgtttccatagcagcatcaacaccagtgaggaatcgggacgcaatctgtaatcccctatcccacttttccttttctcttagaatgggacagagcagcctcgagcagctagtgtcctgtagtgactccagtttgctgctctcttccttatcttcttcctcctgccctctgcctcctctgcattcttcaccttctacatcaggaagctcaagtcaccaagctaagcctgggcttctcatctaaatcacggagtgccagtcaatgcctcccttcctcttcccagggagcaacttcaatcttccctgcttgcagtgaggagctagaccctactcctttttccctgtgggaccatccacagcctgtttcctcacccctgtaatgggactgcagtcctccctgcccatctggcagtgctaattccaggccaggggccctcctgggaaaatcaccagtgtgggtgatatggtgagtgtttgtgtgtgtggaggggtggggctgccctctgaccatttacagaccctgtccttcctctctccccatgcttgtcgcatgtcaggaatccctctcctttgtgccatgaaatagaaggcattttcagatccatcatctcattgagacttgcatctccttggtgaagttggagttattgtcaccattttactgatgagtaaaatgagtctcagaaaggggaaagtcgttgcccagggttccgctgtggacttatagtggagctgggattaggatgcgtgttctggattcctggcggggtcctggcccatttgcagctaaggcctgtctttctgctcccatgaggtcccttttccattcctttcctccccatgacaaccactgtcaccaccacccagagcctgtgctcactgtcacaccacccttcgctgacccctgcatcttggttggatcccaccatgtccatcagacagattttcctcaatggtggttgggctccaaatctaccctccccagactgacacaaattgcactacagggggccccaactgtaggcgtttctggtctagagagggagatggtcccgtagaaatgtcaacatcacttggtagaggagagtggaagcacaggagaaagttcaggaagtgacatcaggaggaggtggcccttgagttgggtcttgagggatgtgtaagagttaccaggtgaggaatgctgggaagggaattccaggaggaaagagcagcattctccaaggctcagactggtgtggtcactgcagggtagagctaggtgacctggaccccttgagacagtgctccccttttaggaggacatctgcagttcccatactttgggctgtctcagaatcccccagagatcttgggaaattcctgggtccagttcccagggattctggtccaggcagaggaatctgcacttctcacaggcaggggctgtgacctcgccccacagttctgatgcagttggtccccggatcactcttggagaaatacaagcaggactgagaggctttgacccaagcactgtgcagggggtgggatggggatagatgtggaatgggccagaggaatagtggttagatctataccctcctgtatgaccctgtctaaaatatggctctcccatccccctctcccactgacacattctatcctccttcacttttcctttattttattttactttttgtagatacagggtctccctatgttatccagacaggtctcaaattcctgacctcaaccatcctcacatctcggcctcccaaagcactaggattacaggcatgaagcatcatgctctcgtcaccaactcacatgctgaccatttgactagttcagttattacctgttttactctattagcatgagggctacatgaggaaagggactttatgtatgtcattcactgctgtagccaagcatctacaatgtgtgagttcatggaagctttttatgttttggtttgtaattttaattttgggaagcagaagatatctgattggactcagtggctgacaggaaaaggaagaacagtcctggtgtgcacaagagtgacagggagacctagatggagagatgtcagaggacagttcctggaagaggctgacggaaaggtaaggcaactggggagggtctctctggacatcaattcctttgaagctggcagggagggaggaagtgcatgggtggagaggaatgcctgaagaagacctccttggcttccatattcttcatgaagtgacaggtgaggggtttccttggaagagagggtaggaggggaacaagtgtaggctggtgatggtgggccaggagcagtgccccagggtgaaggggtgaatgcattactgaggctggactctggtcatgacccttgccttggcctcaagattcattaaaaaccagactcctccagtgagcttagatcatgccactgcactccagcctggagacagagtgagactccatctcaaaaacaaaaacaaaaaaccagcctccagtcccaatgtgcccagctggaccatgtgctgcttcctggatgtgccaccatcacaactggaacacaaatcctgagtcaccgcctctagaaagcctacctggattgagtgcccatctgagtgggctcctgcagcacctggtctgtccctactatgtgacttgcatctgcctgcctcttatcacaggtgcctgtggttttaccttcctcagtgtgggctgttgaggactgggccaggctgatccatcttaggggctacagcaggtgccagcaatggctgggctttgtcaggcctgggcaataggcaggcctgtttctcatgctaggcactgggtgccctttgtgggcccaactgggcatggccactgcttctgagtgtcccgaagattcctgggagaggcctggttatcttgggctgaccctcactccccagttccttcctccctctgtcccttgccgaaacccttttgcatgtcctcaaaatcctgctccagcaccagcagccccctggttttcagcagcctcagggaactcttccttttgttccttgctgtgagtaagaggcccaatcccctgaggacactgctcccttgctgtcctctgctgcagcccttccctgggcctgagcagggtagatcctccttgcttctcattgcctccctctttcagctcatcatacttctctcccatataaagacattcatgtgccacgaaatgatgtttcggtcaacatagaccacatgtgcaatggtggacccatgaaactataatggagctgaaagacacctactgcttagcccagtgacataacaagtgtaatattatggcagagttactttaaaaatatatttattaaaaaagatttataatactatagaaaaagaaatatatatctcgtagtgtagcctaagcttccagtgtttataaaatctataatagtgcacagtcatgccctatgacttcaccttcactcaccactcactgattcacccagagaagtttccagccctgcacgttgcatcaatcataagtgtcctagaccagtgcaccatgtctaggtaccatactatatttttatatagtgcaatactctgtttttactgtacctttcatgatatgtttagatgtacaagtactgacaattgtgctacaactgccaacagtattcactgcagtaaactgtgcccaggtgtgcagcctgagagcagtaggctgtgccatagagcctaggtgtgcggtaggtacaatattcagatgtgtgtaagcacactctgtgaagtttgcacaaagaaaatttaccaaaggagatggtgacacatgaagggaatcaatattgaagctcttgctctcagattgcacccaggaccacatccctattcactgaagacttagctcccagttcatgggcactttctcctgtggggaggatgccaacatgcacatacagagcccttctcatgctctggctcttggtccctccacctctagagacattgtctgcaccctccctgagtcacccactcctacctgtatattcttgaccatatcactgcagaaactgtagctactccagaccctgaatttaaaacaccatttttttgaccaaccactttcctttttccagctgcctcccaactccaacacacttcaatgactccaaattttcactttgtgtcttactcaccttctttcaaatttcccctcctcccagctgagactatatggtccagcctgtcatccatcctcttaacactctccactctcttgccccactattgattgtactcccagggcaaaaccacactcccctgaaacccagccacacactccctctgctcctgcactcaggtggctgagcacagccagagagaaacacacgtgccttctggtctcaattaatcatcaagcccaaacatccagtggaccatggatgctgtcctaaaaaactcactcatctcctgagtccttaagtctttatttgttattttaataaaaacatacgtaatatgtgtaaaatattctgcatatatgattatatatgtaattgtatagatataattcacataattatataaaaatgtatatcatattcttcacataaaaactagacagaaggtttctgagaaacttcttcgtgatgtgcacattaatcaaatagatttgaaccattctttttattcagcagtttggaaacagactttttgtagaatctgcaaagagatatttgtgagtgctttgagacctatggtgaaaaaggaaatgtcttcacataaaaactagaaagaagctttctgagaagcttctttgtgatgagtgcattcacctcacagagttgaaccattcttttgcttgagcagtttggaaacagtctttttgttgaatctgcaagaggatatttgtgaggcctttgaggcctattgttgaaaaaggaactatcttcacataaaaactagacagaaagtttctttttttgttgtttctttagtgccctttattataaatcccttctttttttagttttgtgacattggttttttttttaagaagacaagttggttttttgtagaatgtccctaaatttctatttgcttgtttcctcatgcttagattttgggaagagtactaactaggtgatgtttagttgctcccctttaaatgacatgtttttaagtcaataaaataaaacaagcaataccacaatgctatctcctccatcttagagacccatcctagcatttcatcatagtcattcagtaaaatattcttcccttagggttggatttcagcatgtggtagatcttgatgaactctccctggttcactggagctccagaaccaggaaatataattagaaatgttattagagataaaaaagcctaagttgatagatttttctattttgagaccacaaagagacttctgacatagtattttacagtgaataccaggctactgagctcctctgtctactgtctaaattatttttgtttttaattggaaaaattaacacatacatataagaaaacaagtaaaacaatcccatgcatacaataaaattaaatcttcatcttaatccaaatcctcccaattccacaacccagagaaccaatgttagcagtttcttgtgtatctgttaaaatactgtttacaagcatattacatacagctctccatcttgctagttaatggtggagatctttctaagttagcacaaatatatttacatctttctctttagccaatattccatagactcaaacatattcaaatcagccatattgattcaaattatgaatcaaccataatttacttaaatgatctccaattgataggcatattttgctattgctgtaatgaaggcagaaataaagatgttctttgaaaccaacgagaacaaagacacaacataccagaatctctgggacgcattcaaagcagtgtgtagagggaaatttatagcactacatgcccacaagagaaagcaggaaagatccaaaattggcaccctaacatcacaattaaaagaactacaaaagcaagagcaaacacattcaaaagctagcagaaggcaagaaataactaaaatcagagcagaactgaaggaaatagagacacaaaaaacccttcaaaaaattaatgaatccaggagctggttttttgaaaagatcaacaaaattgatagaccactagcaagactaataaagaaaaaaagagagaagaatcaaatagatgcaataaaaaatgataaaggggatatcaccaccgatcccacagaaatacaaactaccatcagagaatactacaaacacctctacacaaataaactagaaaatctagaagaagtggataaattcctagacacatacactctcccaagactaaaccaggaagaagttgaatctctgaatagaccaataacaggatatgaaattgtggcaataattaatagcttaccaaccaaaaagagtccaggaccagatggattcacagccgaattcttccagaggtacaaggaggaaccggtaccattccttctgaaatttttccaatcaaaagaaaaagagggaatcctccctaactcattttatgaggccagcatcattctgataccaaagccaggcagagacacaaccaaaaaagagaattttagaccaatatccttgatgaacattgatgcaaaaatcctcaataaaatactggcaaaacgaatccagcagcacatcaaaaagcttatccaccatgatcaagtgggcttcatccctgggatgcaaggctggttcaatatacgcaaatcaataaatgtaatccagcatataaacagagccaaagacaaaaaccacatgattatctcaatagatgcagaaaaggccttagaaaaaattcaacaatgcttcatgctaaaaactctcaataaattaggtattgatgggacgtatttcaaaataataagagctatctatgacaaacccacagccaatatcatactgaatgggcaaaaactggaagcattccctttgaaaactggcacaagacagggatgccctctctcaccactcctattcaacatagtgttggaagttctggccagggcaattaagcaggagaaggaaataaagggtattcaattaggaaaaggggaagtcaaattgtccctctttgcagacgacatgattgtttatctagaaaaccccattgtctcagcccaaaatatccttaagctgacagaaagtttctgagaaacagatttgagatttctgcattcacctcacagagtcaaacacttcttctcctggagcagattggaaattctgttcttgtagaatctgcaatggtttatttgtcagtgctttgaggcctatggtgaaaaaggaaatatcttcacataagaactagaacgatgctttctgaaaaaaattccttgtgatgtgtgcattcatctaaaagagttgaactcttcttttcactgagcagtttagaaacagtctttttgtggaatccaaacagggatgtttttgagcgatttgaggcctatgatgaaataggaaatatcttcacttaaaaactaaacagaaggtttctgacaaacagctttgtgatgtgtgcattcatctcacagaggtaaacgtttcttttcattgagcagattggaaaatctgttcttgtagaatccgcaaagggatatttgtgagtgctttgagacctattgtggaaaaggaaatatctccacataaaaactagacagaagttttctgagaacgttctttttgatatggatattcaggtcacagtgttgaaatttcttttgattgagcagtttagaaagagtgtttttgtagagtttgaaaagggatatttttgagcgcactgaggcctaaggtgaaaaaggaaatatattctactaaaaactagacagaagctttctgagaaacttctttgtgatttgtgcattaatctcacagagttgaacctttgcaaagggatattggtgagcgatttgagtcctgtggtgaaaaagtaagtatcttcatatgaaaactggacagaggatttctgagaaacatgtttgtgatgtttgcattcatctcacgagctgaacctttcttaagattgagcactttggaaacagtctttttacagaatctgcaaagggatatttgtgagtggtttgaggcctatggtgaaaatagaaatatcttcacattaaaactagacaaaatctttctgagaaacttctttgtgatgtgtgcattcatctcacagagctcaacctttctactgattgagcagtttggatacagtctttttgtggaatctgcaatggataaatgtgagcgctttgaggcctatgatgaaaaaggaaatatcttcacataaaaactagacagaagatttctgagaaacttatttgtgatgtgtgcattcatcgcacagagttgaaccttcctttttattgaacagtttgtaaacagtctttttgtagaatctgcaaaggcatatttgtgagcactttgaggcctatgctgaaaaatatcttcacataaaaactagacagaagacttctgagaaacttctttatgatgtgcgctttcatttctcagagttgaacttttctgttgattgagcagtttgcaaacagtctttttgtagaatctgcaaagggatatttgtgagccctttgaggcctattgttgaaaaggaaatatcttcacataaaaagtagacagaatgtttctgagaaactgctttgtgatgtgtgcattcatctcacagaagtaaacgtttcttttcattgagcagattggatactctgttcttgtagaatctgcaaagggatatttgtgagccctttgaggcctattgttgaaaaggaaatatcttcacataaaaagtagacagaatgtttctgagaaactgctttgtgatgtgtgcattcatctcacagaagtaaacgtttcttttcattgagcagattggatactctgttcttgtagaatctgcaaagggatatttgtgagcgatttaaggcctatggtgaaaaaggaaatgtcttctcataaaatttagacagaagctttctgagaaactattggtgatgtgtgcattcatctcaaagagctgaatctttcttttgagtgagcattttggaaaaagtcttttggtagtatctgcagagggatattgcaagtgctttgaggcctatggtgaaaaaggaaatatcttcacataaaaaccagacagaagctttctgagaaacttctttgtgatgtgtgcattcatctcaaagagttgaatctttcttttgagtgagcattttggaaaaagtcttttggtagtatctgcagagggatattgtgagcgctttgaggcctatggtgaaaaaggaaatatcttcacataaaaaccagacaggagctttctgagaaacttctttgtgatgtgtgcatttatcccacagaggtaatgctttctttccattgagcagattggaaactctattcttgtagaatctgcaaagtggtatttgtgagccctttgaggcctacggtgaaaaaggaaatatcttcacataaaaactagacagaaagtttctgggaaactactttgcgatgtgtgcattcatctcacagatgtaaatgtatcttttcattgagcagactggaaactccattcttgtagaatctgcaaagggatatttgtgagctccttgaggcctaagatgaaaaaggaaatatcttcacgtaaaaactagagagaagcacgctgagaaagttctttgtaatgtgtgcattcatctcacagagttgacattttcttttgattgagcagtttggaaacagtctttttgtggattctgcaaatggatattcggagtgctttgaggcctatgttgaaaaaggtaatagcttcaggtaaaaaacaggtagaagctttctgcgaaacttctttgtgatgtgtacattcatctcacagagttggaaatttcttttgattgagccctttggaaacagtctttttgtagaatctgcaaaggcatatttgtgagtgctttggggcctatggtgaaagaccaaatatcttcacacaagaactagactgaattttctgagaaacatcttcgtgatgtgtgcattcacctcacagagtagaatctttcttttgattcagcagtttggaaacagtctttttgtagattttgcaaagggatatttgtgaacccattgaggcctatggtgaaaaaggaaatatcttcacataaaaactagacagaagctttctgagaaactgctttgtgatgtgtgcatacatctcacagagttgaaactttcttttgattgagcagtttggaagcgtctttttgtagaatcttcaatgggatatttgtgagcccttggaggcctatggtgaaaaaggatatatattcacataaaaactagacagaagttttctgagaaactgatttgtgatgtgtgcattcatctcacagaggtaaatgactcttttcattgcacagattggaaactctcttcttgtagaatctacaaagggatatttgtgagtgttcttaggcctatggtgaaaaaggaaataccttcacataaaaactagacagaacatttctgagaaacttctttgtgatgtgtgcattcatctcacaaatttgagccttgtttttgattgagtagttttgaaatgtattttttttagaatctgcaaagggataattgtgagcactttgaggcttatggtgaaaaaggaaatatcttcacataaagagtagagagaagctttctgagaaacttctttattatgtgtccattcatctcacagagatgaaagttacttttgattgagcggtttgcaaacagtctttttgtagtatctgcaaggggatatttgtgagcaccttgaggcctatggagaaatcggaaatatcttcacatgaaaacgagacagaagctttcagagaaacttccttgtgatgtgtgcattcatcttacagagttgaacatttcttatgattgagcagattggaaacagtctttttgtagaatctgcaaagggatatttgtgagccctttgaggcctatggtgaaaaaggaaatatcttcacgtgagaactagacagaagcattctgagaaacttctttgtgatgtgtgcattcatcttacagagttgaacatttcttatgattgagcagattggaaacagtctttttgtagaatctgcaaagggatatttgtgtgtgctttgaggtctatggtgaaaaatgaaatatcttcacataaaaactagacagaagttttctgagaaactgattcatggtgtgtgcattcatctcacggaaataaacgcttcttttcaatgaacagattggaaactctgttcttatacaatctacaaagtgatatttgtgagagctttgaggcctactgtgaaaaaggagatacattcacataaaaactagacagaacatttctgagaaacttctttgtgaggtgtccattcatcacaaagagttgaaaatttcatttcattgagcaacttcaaaacagtctttttgaaaaatctgcaaagagatatttgtgagcggtatgaggccatggtgaaaagggaaatatcctcacattaaaactagacagaagcttttttttaaaaataatttctcagtctttatttaataagagttctgaaagtattacaaacatggagtaagtcttactatgttgaagagaaaggaaaactgtatagattgtaaaaaaccgtttttctctttcctttaacaaaagtgtgtatacatttgcatgaatgcagctgtggtgcaaaacttagatataagagcttttgttgctatttctggcactggatttaatactacttttccactcatggggaattaattagctgatgtaacttcctcaggaaacactagatacttgcttgcctacttttacagacacagaaaattctggttgggactctgtcagtcccaattacagagctgttagagaatttatctttgtcatgtgaaatgtatcaaattattgtgtgaaacaaaatacttgttgttttttgaaattcatagggattaatttgaaaacaacatttatatttgtaaaaccaacacagaatatggaagggaagtaaatattcttcaatgtagaatatgtaaactctgtctttttgagctgctaatgaaagaatgtattattaggaaaagtatcatacaggattttaatgtgacacgtggcttacgctgattctatcatagtcttttatgctaagaaatgatgatttaataatatcttcaaagaaagtaagtagagttgtcattaccaaaataagtcaaggcaattggccatgtaaatttaacataattttgtttccactttatatgttgttccacaacataattttgttttccactttagctgtacttatttttttcttttattattattatactttaagttttagggttagcattaaatattaaagtattatactttaataaaaatattatagtattattacactttaataaaaatattaaagtataatattattactatacttaaaaatattaaagtataatattattaccatactttaataaaaatattaaagtgtaatattattatactttaagttttagggtacatgtgcacaatgtgcaggtttgttacatgtgtgtacatgtgccatgttagtgtactgcacccattaactcatcatttagcattaggtatatctccgaatgctatccctccccactctccccaccccacaacagtccccagagtgtgatgttccccttactgtgtccatgtgttctcattgttcaattcccacctatgagtgagaacatgcagtgtttggtttttctgtccttgtgatagttggctgagaatgatgatttccagtttcatccatgtccctacaaaggacatgaactcatcattttctatggctgcatagtattccatggtgtatatgtgacacattttcttaatccagtctattgttgttggacatttgggttggatccaagtctttgctattgtaaatagtgccacaataaacatatgtgtgcatgtgtctttttggcagcatgatttatagtcctttggttatatacccagtaatgggatggctgggtcaaatggtatttctcattctagatccctgaagaattgccacactgacttccacaatggttgaactaatttacagtcccaccaacagtgtaaaagtgttcctattcctccacatcctctccagcaccttttgtttcctgactttttaatggtcaccattctaactggtgtgagatggtatctaattgtggttttgatttgcatttctctgatggccagtgatgatgagcattttttcatgtgtcttttggctacataaatgtcttcttttgagaaatgtctgttcatatcctttgcccactttttgatgggttttgttttcttgtaaatttgtttgagttcattgtagattctagatattagccctgtgtcagatgagtaggttgtgaaaattttctcccattttgtaggttgcctgttcactctgatggtatttcttttgatgtgcagaagctctttagtttaattagatcccatatgtcaattttggcttttgttgccattgcttttggtgttttagacatgaagtccttgcccatgcctatgtcctgaatggtattgtctaggtttgcttctagggtttttatggttttaggtctaacatgtaagtctttaatccatcttgaattaatttttgtataagttgtaaggaaaggatccagtttcagctttctacatatggccagccagttttaccagcatcatttgttaaatagggaatcctttccccatttcttgtttttgtcaggtttgtcaaagatcagatagttgtagatatgcagcattatatctgagagctctgttctgttccattgatttatgtctctgttttggttccagtaacatgctgttttggttactgtagccttgtagtatagtttgaagtcaggtaaggtgatgcctccagctttgttcttttggcttaggattgacttggcgatgcaggctttttttggttccatatgaactttaaagtagtttttttccaattctgtgaagaaagtcattggtagcttgatggggatggcattgaatctataaattacgttgggcagtgtggccattttcatgatattgattcttccaacccatgagtatggaatgttcttccatttgtttgtatcctcttttatttcattggaaagtggtttgtagttctccgtgaagaggtccttcacatcccttgtaagttggattcctaggtattttattctctttgaagcaattgtgaatgggagttcactcatgatttggctctctgtttgtctgttattggtgtataagaatgctcgtgatttttgcacattgattttctatcctgagtctttgctgaagttgcttatcagcttaaggagattttgggctgagacaatggggttttctagatatacaatcatgtcgtctgcaaacagggacaatttgacttcctcttttcctaattgaataccctttatttccttctcctgcctaattgccctggccagaacttccaacactatgttgaataggagtggtgagagagtttatccctgtcttgtgcccgttttcaaagggaatgcttccagtttttgcccattcagtatgatattggctgtgggtttgtcatagatagctcttattattttgagatacatcccatcaatacttaatttattgagagtttttagcatgaagagttgttgaattttttcaaaggccttttgtgcatctattgagatagtcatgaggtttttgtctttggttcggtttatgtgctggattacatttattgatttgtgtgtgttgaaacagacttgcatcccagggatgaagcctacttgatgatggtggataagctatttgatgtgctgctggattcagtttgccagtattttactgaggatttttgcatcaatgttcatgaatgatattggtctaaaattctcttttttggttgtgtccctgccaggctttggtatcaggatgatgctggcatcataaaatgagttagggaggactccctctttttctattgattggaatagtttcagaaggaatggtaccagttcctccttgtacctctggaagaattcggctgtgaatcaatctggtcctggactctttttttgtgatgtgtgcattcatctcagagggttgaaactttcttttgattgagtagtttggaaacagtctttttttagaatctgcaaatggatatttggagcacttggggactatggtgaaatagaaagtatcttcactttaaaagtagacaaatttttctgggaaacttctttgtgatgtgtccattcaacacacacagacttgagcatttctttcaattgagcagtttggaaacaatcttattatagaatctgcataaggaaatttgtgagaggtttgaggcctatgttgaaaaaggaaatatcttcacattaaaactagacagaagctgtctgagaaactcctttgagatgtgtgcattcatctcacggagttgaacttttcttttgattgagcagtttggaaaatgtctttccgtagaatctgccaagagatatttggagtgctttaaggcctattgtgaaaaaggaaatatgttcacataaaaactagacagaagttttcgcaaaatctgatttgggatgtgttcattcatcttacagtgttgaacctttcttttcattgagcagtttggaagcagtctctttgtagaatctgcaaagggatatttttgagcacttggaggcctttggtgaaaaaggatatatcttcacataaaaactagacagaaggtttctgagaaactgatttttgatgtgtgcattcatctcacagacgtaaatgcttcttttcattgagcagtttgcaaactctgttcttgtggaatctgcaaatggatatttgtgagggctttgaggcctatggtgaaaaaggaaatatcttcacataaaaactatactgaacatttctgagaaacttctttgtgatgtgtgcattcatctctcacattggaaactttcttttcattgagctgtttggaaacagtctttttgtataatctgcaaagggatatttgtgagccctttgaagcctatggtgaaaaagaaaatatcttcacataaaaactagacagaagccttctgagaaacttctttgtgatatgtccattcatctcacagagttgaaccctacttttgattgagcagttttgaagaagtctttttgtagaatctgcaaagggattttagtgagcagttctaggcctacggtgaaaagggaaatatcttcgcataaaaactagacagaaggtttctgagaaactgatttatgacgtgggcatttgtctcacagacataaatgctccttttcattgagcagtttggaaaaagtctccttgtagaattagcaaatggatatttgtgagtgctttgaggcctatggtgaaaaggaaatatcttcacataaaaactaaacagaagcattctgagaaacttctttgtgagctgtggattcatgtcacagagttgaacctgtcttttgatagagcagctttgaaacagtctttttgtagaatctgcaaagggatactttggagtgctttgaggtctatggtgaaaaaagaaatatcttcacataaaaactatatggaagctttctggaaaacttgtttgtgaactctgcattcatctcacagagttgaaactttattttgattgagcattttggaaagagtcgttttgtagaatctgttaagggatatttgtgagtgctttgacatctatggtgaaaaaggaaatatcttcacagaaaaactagatggaagctttctgagaaacttctctgtgatgtgtgcattcatctcagagagttgaacctttcttttgattgagcagtttggaaacagtctttttatagaatctgccaagtgataattggactgcatttaggccaatggtgaaaaaggaaatatctatacataaagactagttagaagctttctgaggaacttctttgcgatgtgtgcattcatctcacagacttgaacctttctgttaattgagctgtttggaagcagtctttttatagaatgtgcaaagggatatttgtgaagcagtttgaggcctatggtgaaaaaggaaattcctcatatgtaaattagagagaagctttatgagaaacttctctgtgatgtgtgcattcatctcacagagttgaatctttctttggattgaacagtttggaaacagtctttttgtagaatctgcaaatcaatatttgccgctctttgaggcctgtggtgaaaaaggaaatattttcacataaaaagtagacagaagctttctgagaaatttatttatgatgtgcgcattcatctcacagagttggaccttcctttgattgagcagtttggaaacagtctttttgtaaaatctgcaattcagtatttgtcacgctttgagtcctatggtgaaaatggaaatatcttcacatgaaaagtatatggaagctttctgagaaacttttcttatgtgtgcattcaactcacagggctgaacctttcttttgattgagcaatttggaaacagtctttttgtagtatcagcaaagggatatttggagcgctttgaggcctaagttgaaaaagggaatatctgcacataaaaactagacagaagctttctgagaagcttctttgtgatgtgggcattcatctcagagagttgaacctttcatttcattgagcagtttggaaactgtctttttgtagaatctgcaaaaggatatttggtgtgctttgagacctactgtgaaaatggaaatatcttcacataaaaactagatggaagcattctaagacacttacttaagatgtgagcactcatctcccagagttgaacctttcttttgattgagcagtttggaaacagtcattttgtagaatctgcaaagggatgttttgagctgtttgaggtctatggtgaaaaaggaaatatcttcacataaaaactagacagaagctttctgagaaacttttctgtgatgtgtgcattcacctcacagagttgaacttttctttggattgaacagtttggaaacagtctttttgtagaatctgcaaattgatatttgccactctttgaggcctgtggtgaaaaaggaaatatcttcacataaaaattagacagaagctgtctgagaaattctttgtgatgtgtacattcgtctcacagacttaaacctttttttgagcagtttggaagcagtctttttgtagaatctggaaagggatatttggagaactttgaagtctttggtgaagaaggaaatatcttcacatcaaaactagacagaagctttcttagaaactactttgtgatgtgtgcattcatctcacacagttgaagctttctttgaattgagcagtttggaaacagtgtttttgtagaatctgtaaagagatacatggagcgctatgaggcatctggtgaaaaaggaaatatcttcacataaaaactagacagaatgttcctgagaaacctctttgtgatgtgtgcattcatctcacagagttgaaaatttcttttgatggagcagttttcaaagagtctttttgtggaatctgtaaagggatatatgtgagcactttgaggcctatagtgaaaaggaaatatcttcacatcaaagctagatggaaaatctctgagatacttctttgtgatgtgtgcattcatctcacataggtgagcctttcttttgattgaacagtttggaagcagtcgtttctagaatctgcaaattgatatttgccactctttgaggcctgtggtaaaaacgaaatatgttcacataacaactagactgaacgtttctgagaaacttctctatggtgtctgcattcatctcacagagttgaaccttcttttgattgagcaggttggcaacagtctttttgtagaatctgtaaattgatatttgccgcactttgaggcctatggtgagaaaggaaatatcttcacaagaaagtagatggaagctttctgagaaacttgtttgtgatgtgtgcattcatctcacagagctgaacctttcttttgattgagcagtttgtaaagagtcttttgtagaattggcaaagggatatttggagtcctttgaggcctatggtgaaaaaggaaatatctccacataaaaactatacagaagctttctgtgaaacttctttgtgatgtgtgcatacatctcagagacacgatcttcacatgaaaactagacagaagctttctgagaaacttccttgtgatctgcacattcctctcacccagttgaacttttcttttgattcagcagtttggaagcagcctttttgtagatcctgcagagggatatttctgagtgctttgaggcctgtggtgaaaaatgaaatttcttcatataaaaactagacagaagctttctgggaaacttccttgttatgtgtgcattcatctcacagaggtgaacctttcttttgattgatcagtttggaaacagtctttttgtagaatctgcaaagagatatttggattgctatgagacctatcttgaaaaacgaagtatcttcacataaaaactagacaaaagctttctgagaaacttctttgtgatctgtgcattcatctcacagagcaaaaccttccttttgattgagcagtttggaaacagtccttttgtagtatctgtaatgggatatatgtgagcctcttgaggcctggggtgaaaaaggaaatatcttcaaataaaaacaagacagaaacattctgagaaacttctttgtgatgtgtccattcatcgcacagagctgaacatttcctttgattgagaagtgtggaaacagtctttttgaagaatctgctgagggatatttgtgagcagtttgagacctgtggtgaaaaagaaatatctttacattaaaaatagacagaagctttctgagaaactgctttttgatgtgtggatacatctcacagattagaagccttctttgaattgagcagtctgataacagactttttgtagaacctgcaaatgtatattttgaatactttgaggcctatggtgaaaagggaaatatcttcaaataaatctagacagaatctttctgtgaaacttctttgtgatagctctattcatctcacagagttgtacatttcttttaattgagcagtatgtaaacagtctttttgtagaatctgcaaagggatatttctgagtcgtttgaggcctctggtgcaacaggaaatatcttcacataacttctagccagaagctttctgagaaacttctttgtgatgcgtggattcatctcacagaggagaaattttcctttgattgatcaatatggaaaatctctttatgtagaatctgccaggggatatatggagtgcattgaggcttatgttgaaaaaggaaatattttcacataaaaactaaacaaaatctttctgagaaacttctttgtgatctctgcaatcatgtcagagagttgaaactttcttttgattgagcagtttggatacagtctttttgtagaatctgcacatggatatttgtgagtggtctgaggcctatggtgaaaaaggaaatatcttcacataaaaactagaccaaagatttctcagaaacttcttggtaatgtgtacattcatctcacatattcgaacatttcttttgattgaacattttgcaaacactcttattgtagaatctgccaagggatatttggagcgcattgaggcctatggtgaaaaaggaaacatctacatataaaaactagacagaggctttctgaaaaacttctttctgatgtgtgcattcatctcacagagttgaaccttcctttcacggagcagttgacaacagtctttttgtagaatctgcaaaggaatatttggagcactttgaggactatggtgaaaatggaaatatcttcacataaaatttagacagaagctttcagaaaaacttccttatgatgtgtgcattcatctcacagagttgaacgtttcttttgatcgagcagtttggcgacagtctttttgtagaatatgcaaaaggatatttggcacactttgaggcctatggtgtaaaacgaaatatcttcacctaaaaagtagacggaagttttctgaggaaccactttgtgatgtgtgcattcatctcacagatttgaaccattcttttgattgagcagtttagacacagtctttttgcagaatctgcaaagggatgtttggagcgcattgagacctatggtgaaaaaggaaatatcttcacataaaaattacagagaacctttctgagaaacttccttgtgatgtgtgcattcatctcacagtgttgaacatttctattgattgagcagttttgtaacagtctttttgtagaatctgtaaagggatatatgtgagcactttgaggctcatggtaaaaaaggaaatatctgcacataaaactagacagaagatttctgagaaacttctttgtgatctgtgcattcatctcactcagtttaaccattcttttgattgagcactttggaaacagtctttttgtagagtctgcaaagggatacttgtgagcattttgagccctagggtgaaaaaggatatatcttcacataaaaactagacaaaagctttctgagaaacttctttgtaatgcgtggattcatctcacagaattaaacttttcttttgattgaacagtttggaaaagtctttttatagaatctgccaagggatatttggagtgctttgaggcctatgatgtaaaaggaaatatcttcacataaaaactagacagaagatttctgagaaatttctttgtgatttttccattcatctcagagagttgaatgttttctttgattgaacagtttggaaacaatctttttgtagaatctgccaagggatatttggagtgctttgaggccatggtgaaaaaggaaatatctttacataaaaactagacagaagctttctgaggaacttctttgtgatgtgtgctttcatctcacaaagctgaacctttctttttattgagcagtttgtaaaaagtctttttgtaaattctgcaaaaggatttttgtgagctgtttgatgccgatgttgaaaaaggaaatattgacaaataaaatctagacagaccctttctaggaaactactttgggatgtgtgcattcatctcacagagttgaaccattcttttgttgagcagttgtggaaacagtgtttttgtagtatctgcagagagatatatgcaggcagttataggctaattctgaaaaagtaaatatcttcatataagaactagacagtaggtttctgagaatcttccttgtgatgtgtgcattcatcatactgagttgaacctttgttttgattgagcagtttggaaacagtctttttgcagaatctgtaaagtgatatttgagaacgcttttatgctcatggtgaaaaatgaagtatcttcacataaaaactagacagtagcattccgagaaacttctttgtgatgtgtgaattcatctcacagagttgaacctttgttttgattgagcagtttggaaacagtctttttctagaatctgcaaaggatatttgtgagcgctttgaggcctatggtgaaaatggaaatttcttcacataaaaactaaagagaagttttctgagaaacttctttgtgatgtgtgctttcatctcagagatttgaatcttccttttggttgagcagtttggacacagtctttatgtagaatctgtacagggatatatgagcactttcaggcctatggtgaaaaaggaaatatcttcacataaacactagacagaagctttttgagcaacttctttgtgatgtctgcattcatctcatagaggtcaacctttcttttcattgagaagtttggaaacagtctttttgtagaatctgccaagtgatatttgaaccacttttaggcctatggtgaaaaaggaaatatgtttacataaaaactagacagacgctatctgagaaacttctttgtgatgtgtgcattcatctcacagtgttaaatctttctgttcattgagcaatttggaaactgtctttttgtataatctgcaaagggatagttgtgagctctttgaggcctgtggtgaaaaaggaaacatcttcacataaaaactagagagaagttttctgagaaacttccttgtgatctgtgcactcacctcacagggttgaacctttctgttcatttagcagtttggaaagagtctttttgtagtatctgcacagggatatttgtgagccctttgaggcctttggtgaaaaaggaaatatcttcacataaaaactagacagaagatttctgagaaacttccttgtgatctgtgcattcatctcacagagctaaacctgctttctgattgaacagtatggaaacagtctttttgtagaatctgcagcgtgatattgggatagcttttaggcctgaggtgaaaaaggaaatatcttcacatgaaaactagacaggtgttttctgagaaacttctttgtgatgtttgcattcatctcatggagttgaacttttcttttgattgagcagtttggaaagagtatttttatagaatctgtaaagggatatgcataagccctttgaggcttatggtgaaaaaggaaatatcttcacgtcaaaactagacagaagctttcagagaaacttctttgtgatgtgtgtattcatctcacagagttgaatctttctgttcattgagcaattttgaaacagtctttttgtagaatctgcaaaaggatatttgtgagccctttgaggcctatggtgaaaaaagaaatatctttacataaaaacatgaaagaagcattctgagaaacttccttgtgatgtattcattcatctcacacagttgaatctttcttttgatagagcagatcagaaacaatctttttgtggaatctgcaaaggaatattcatgaatggtttgaggcctatgttgaaaaaggaaatgtcttcaccttaaaaatagacaaaagatttttgagaaacttttctgtaatgtgtgcattcatctcacagagttgaacatttcttttgattgagtagtttggaaacaatctttttgtaaaatctgccaagggatatttggagcgctttgatgcctgtggtgaaaaaggaaatatattcatattaaaactagatagaggtttttcagaaaattctatgtatgtatgcattaatctcacagagttgaacatttcctttgattgatcagttcggaaacagtctttttgtagaattggtaaaatgatatttggagcaccctgagggctatggtgaaaaaggaaatatcttcacatgtaagctagacagaagctttctgagaaacttcgttgtgatgtgttcatttttctcaaagagttgaacctttcctttgagcagtatgggaacagtctttttgaagaatctgccaagggatattggagagcagtttgaggcctattttgaaaaaggatatatcttcacataaaaactaggcagaagatttctgagaaacttctttgtgatgtgtgctttcatctcaaatagttgaaccttacttttgattgaaccattgggaaagagtcttttgtagaatctacgaaaggatatttggagtgctttgaggtctttggtgaagaagaaaatatcttcacataaaaactagacagaagcttaatgagaaaattctttgtgatggctgcattcatctcacagagttgaacctttcttttgattgagcagtttagaaacagttttttttgtaaaatctgtaaagggatatttggagaactttgaggcctgtggtgaaaaaggaaatatcttcacataacaattagatggaagctttttgagaaacttctttgtgatgtgtggattcatctcacagagttgaaactttcttttgattgagcagtttggaaacagtctttttgtggaatctgcaaaaggatatttggtacgctttgaggtctatggtgaaaaagataacatcctcacataaaaaccagatggaagatttctgaggaacttctttatgatgtgtgcattcatcccacagggctgaaattttcttttgatttagcagtttggaaacagtctttttgtagaatctgcaaagggatattttgagtggtttgaggcctatgttgaaaaaggaattatcgtcacatagaaactagagagaagctttctgagaaactccttgtgatgtgggcattcatctcacagacttgaaactttcttttgatttagcaggttggaagcagtctttttgtagaatctgcaaagggatatttggagcgatttgaagcctttggtgaaaaaggaaatatctccacataaaaagtagacagaagctttctgagaaaattctttgtgatgtgtgcattcatctcacacatttgaacctttttttgatcgagcagttttgaaacagtctttttgtagaatctgtaaagagataaatgtgagccctttgaggcctatggtgaaaaggaaatatcttcacatcaaaactagacagaagctttctgggaaacttctttgtgatgtgtgcattcatctcacagagttgaaactttcttttgattgaacagtttaaaaacagtctttttgaagaatcttcaaatggatatttgagctctttgatgcctatggtgaaaagagaattatcttcacatgaaaactagaaagaagctctctccctctctctctccctctccctctccccacagtctccctctccctctctttccatggtctccctctgatgccgagccaaagctggactgtactgctgccatctcggctcactgcaacctccctgcctgattctcctgcctcagcctgccaagtgcctgccattgcaggcacgcgccaccacgcctgactggtttttgcatttttttggtggagacggggtttcgctgtgttggctgggccggtctccagctcctaaccacgagtgatccgccagcctcggcctccctaggtgccgggattgcagacggaatctcattcactcagtgctcagtggtgcccaggctggagtgcagtggcgtgatctcggctcgctacaacctccacctcccagccgcctgccttggcctcccaaagtgccgagactgcagcctctgcctggccgccaccccgtctgggaagtgaggagtgtctctgcctggccgcccatcgtctgggatgtgaggagcccctctgcctggctgcccagtctggaaagtgaggggcgtctctgcccggccgccatcccatctaggaagcgaggagcgcctcttcccggccgccatccccatctaggaagtgaggagcgtctctgcccggccgcccatcgtctgagatgtggggagcgcctctgccccgctgccccttctgggatgtgaggagcccctctgcccggccgtgaccccgtctgggaggtgaggagcatctttgcccggccgccccatctgagaagtgaggagaccctctgcctggcaaccgccccgtctgagaagtgaggagcccctccgcccagcagccgccccatctgagaagtgaacagcccctccgcctggcagctgccccatctgggaagtgaggagcatctccgcccggcagccaccccgcccgggagggaggtggggggggtcagccccccgccccgccagccgcctcatccgggagggaggtgggggggtcagcccccggcccggccagccgccccgtccgggagggaggtggggggtcagcccccacccggccagccgccccgtccgggagggaggtggggggtcagccccccacccggccagccgccccatccaggaggtgaggggcgcctctgcccggccgctcctactgggaagtgaggagcccctctgcccggccaccaccccatctgggaggtgtacccaacagctcattgagaacgggccatgatgacaatggcggttttgtggaatagaaaggggggaaaggtggggaaaagactgagaaatcggatggttgccatgtctgtgtagaaagaagtagacatgggagacttttcattttgttctgtactaaggaaaattcttctgcattgggatcctgttgatctgtgaccttacccccaaccctgtgctctctgaaacatgtgctgtgtccactcagggttaaatggattaagggtggtgcaagatgtgctttgttaaacagatacttgaaggcagcatgctccataagagtcatcaccactccctaatctcaagtacccagggacacaaacactgtggaaggccgcagggtcctctgcctaggaaaaccagaggcctttgttcacttgtttatctgctgaccttccctccactattgtcctatgaccctgccaaatccccctctgtgagaaacacccaagaatgatcaataaaaaaaaaagaaaaaaaaagaaaaatgaaaaaaaaaaagaaaactagaaagaagctttctgagaaactactttgtgatgtgtgcattcatctcacagacttgcaactttcttttgattgagcagtttggaaatagtctttttgtagaagctgcaaagtaatgtttttgagcgctttgaggcctatggtgaaaaaggaaatatattcacctaaaaactacgtggaagctttctgagaaacttctttgtgatgcgtgcattcatctcacagagttgaaactttgttttgattgaggagtttggaaacagtctttttgtagaatcttcagagagatatttgtgagccatttgatgcctatgatgaaaaaggaaatatcttcatataaaaactagacagaagctttcagagaaatatctttgggatgtgtgcattcatttcatggagttgaacttttcttttgatcaagcagtttggaaacagtttttttgtagaatctgcaaaaggatatttggtgggatttgaggcctactctgagaaaggaaatatcttcacataaaaactagacggaggccttctaagaaacttccttatgatgtgtacattcatctcacagagttgaaactttcttatgattaatcagtttggaaacactgtttttgtagaatccacagatggatacaagtaagccctctgaggcctatggtgaaaaaggaaatatctgcaaataaaaactagacagaagattcctgagaaacttctttgtgatgtgtgcattcatatcacagagctgaatctttccttagattgagcacttttgaaattgtctttttgtatattctgtgcagggatatttgttagcagttaaagtcctttggcaagaaatgaaatatattcacataaaaaccacacagaagctttctgagaaacttctttgtgatgtgtgcattcgtctcacagagtggaaccattctcttgattgagcagtttgggaacagtgtttttgtagaatctgcaaagggatatttgtgatacctttgtggcctatggtgaaaaaggatatgccttcacataaaaactaaacagaaaccttctgagaaatttctgtgtgatgtgtgcattcatctcacaggattcaacctttcttttgattgagcagtttggaaacagtctttttgtacaatctgcaaaggtacatttgtgagcactttgaggactactgtgaaaaggaaacattttcatataaaacctagagagaagttttctgagaacttcttcgtgatgtgtgcattcaccttgcagagttgaatgtttcttttgattgagcagtttgcaaaccatctttttgtagattctgcaaagggaaatatgtaggcgatttgaggttgatggtgaaataggaaataacttcatatgaaaactagacacaacctttctgagaatcttccctgtgttgtgtgaattgatcacacacagatgagcctttcttttgattgagcagtttgtaaacagtgtttttggagaatctgaaaagggatatttgtgagcggtatgaggcctatggtgagaaaggaaatatgttcacataaaaactagacagaagtttctgagaaacttctttgtgatatttgcatttctctctcagatttgaacagttcgtttgattgagcagtttggaaacagactttttgtacaatctgcatagggacatttgtgagcgctttaaggcctagggtgaaacaggaaatatcttcatataaaacctagacagaagctttcagagaaacttctttataatgtgtgcattcatctaaaagagttcaacctttcttttgattgagcagttatgaaacagtctttttgtagaatctgccaagggatatttgtaggggtttgaggcatatggtgaaaagggaaatatcttcatataaaaactagacagaagctttctgaggaacttctttgtgatgtgtgctttcatctcacaaagctgaacctttcttttttttgagcagtttgtaaaaagtctctttgtaaattctgcaaaaggatttttgtgagctgtttgatgccgatgttgaaaaaggaaatattgacaaataaaatctagacagaccctttctaggaaactactttgtgatgtgtacattcatctcacagagttgaaccattcttttgttgagcagtttggaaacagtgtttttgtagtatctgcagagagatatatgcaggcagttataggctaattttgaaaaagtaaatatcttcatataagaactagacagtaggtttctgagaatcttccttgtgatgtgtgcattcaccacactgagttgaacctttgttttgattgagcagtttggaaacagtctttttgcagaatctgtaaagtgatatttgagaacgcttttatgctcatggtgaaaaatgaagtatcttcacataaaaactagacagtagcattccaagaaacttctttgtgatgtgtgaattcatctcagagttgaacctttgtttcgattgagcagtttggaaacagtctttttctagaatctgcaaagggacatttttgagtgctttgaggccaatggtgaaaaagaaaatatcttcacacaaaaaatagacagaggctttctgagaaacttctttgtgatgggtgcattcatctcacagagttcaaactttcctttgattgagcagttttgaaacagtcttttttaaaatctgcataaggatatttgtgatccctttgtggcccatggtgaaaaaggaaatgtcttcacataaaacctagacagaagctttctgagaaactttttgtgatgtatgcattcatcacagagatttgaacatttcttttcatggagcagtttggaaacagtctttttgcagaatctgcaaagagaaatatgtaggcagtttgaggcctatggtggaaaaggaaatatcttcatataagaactacacagaagcttcctgagaatctatggaagctaaatcacataaatactagatagaagccttctcagaaactacgttgtgatgattgcattcacctcacggagtggagcattcctattgacagagcagtttggaaacacccttgttgtagaatctgctagtggagatttggagcgctttgaggcctatggtagtaaatggaagagcttcacataaaatctagacagaagcattctgagaaaatactttgtgatgattgagtttaacacacagagctgaacattcctttggatggagaaggtttgaaacacactttctgtagaatctgcgagtggatatttggacctctctgaggatttcgttggaaacgggataactgcacctaactaaacggaagcattctcacaaaattctttgtgatgtttgcattcaaatcccagagttgaaccttcctttgatagttcagctttgaaacaccctttttgtaggatctgcaagtggatagttggaccactctttggccttcgttcgaaacgggtacatcttcaaataaaatctagacagaagccttctcagaaacttctctgtgatgattgcattcaaatcaaagcgttgaaccctcctatggatagagcagttttgaatctctctttttgtggaatctgcaagtggttgtgtggtcctctttgaagatgtctttggaaacgggaatatcttcacataaaaactaaacagaagcattctcagaaacttctctgtgatgtttgtgtccaaatcacagagtttcacgttgcttttcatagagcagatgagaaacattcttttcgtagggtctgcaagtggacatttggagagatttcaggcctgtggtggaaaacgaattatcgtcaagtaaaaactagagggaagcattgtcagaaacttgtttgtgatgactgcattcaactcacagagttgaaggttccttttcaaacagcagtttccaaacactctttctgtggcatctgcaagtggatgattgggcctctttgaagatttcgttggaaacgggataatcttcacagaaaagctaaacagaagcattctcagaaacttctttgtgatgtttgctttcaactcacagagttgaactttccttttgagagagaagctttgaaacactctttttctagaatctgcaagtggatatttggagggctttgaggcctgtggtggaaaaggaattatcttcccgtaagaactagatagatgcattctcagaaactactttgtgacgattgcattcaagtcacagaggtgaacattccctttcagagagcactttggaaactctcgttgtgtagaatctgcaagtggagatatggaccgctttgaggcctatggtagtaaaggaaacagcttcatataaaaactagacagcagcattctcagaaaactctttgtgacgactgagtttaactcacagggctgaacattcctttggatggagcagtttggaaacacactatctgtaggatctgcaagcggatacttgggcctctctgaggattttgttggaaacgggataaaccgcacagaactaaacagaagcattctcagaaccttcttcgtgacgtttgcattcaacccacagtgttgaacctttctttgatagttcaggtttgaaacactctttttgtagaaactgcaagtggataactgcacttctttgaggcctatcgtagtaaaggaaataacttcctataaaaacaagacagaagctttctcagaaaattctctgggatgattgagttgaactcacagagcagtactttccttgggatggagtagtttcgaaacacactttctgtagaatctgcaagtggatatttggacctgtctgaggaattcgttgcaaacgggataatttcagctaaggaaacagaagcagtctcagaatcttcttgtgatgtttgcattcaaatcccagaattgaaccttcctttgaaagttcaggtttgaaacactctttttgcagaatctacaagtggatattcggaccactctgtggacttcgttcgaaacgggtatatcttcacataacatctacacagaagcattctcagaaacttttctgtgatgactgcattcaactcacagagttgaacactccttttgagagcgcagttttgaaactctctttctctggaatctgcaaggggacatgcagacctctttgaaggtttcgttggaaacggaatcgtcttcacataaaatttacacagaagcattctcaggaactccttggtgatgtttgtattcaacttccagagttgaactttccttcggaaagagcagctatgaaacactctttttctagaatctgcaagtggacattgggagggctgtgaggtttgtggtggaaaaggaaatatctccacgtaaatactagatagaagccttctcagaaactatgttgtgatgattgcattcacctcacggagtggagaattcctattgacagagcagtttggaaacacccttgttgtagaatctgctagtggagaattggagcgctttgaggcctatggtagtaaatggaggagcttcacataaaatctagacagaagcattctcagaaaatactttgtgatgattgagtttaacacacagagctgaacattcctttggatggagcaggtttgaaacacactttctgtagaatctgcgagtggatatttggacctctctgaggatttcgttggaaacgggataactgcacctaactaatcggaagcattctcacaaacttcttcgtgatgtttgcattcaaatcccagatttgaaccttcctatgatagttcagctttgaaacattctttttgtaggatctgcaagtggatatttggaccactatttggccttccttcgaaacgggtacatcttcaaataaaatctagacagaagccttctcagaaacttctctgtgatgattgcattcaactcatagcgttgaaccttcctatggatagagcagttttgaatctctctttttgtggaatctgcaagtggttgtgtggtcctctttgaagatgtctttggaaatgggaatatcttcacataaaaactaaacagaagcattctcagaaacttctctgtgatgtttgtgtccaaatcacagagtttcacgttgcttttcatagagcagatgagaaacattcttttcgtagggtctgcaagtggacatttggagagatttcaggcctgtggtggaaaacgaattatcgtcaagtaaaaactagagggaagcattgtcagaaacttgtttgtgatgactgcattcaactcacagagttgaaggttccttttcaaacagcagtttccaaacactctttctgtggcatctgcaagtggatgtttgggcctctttgaagatttcgttggaaacgggataatcttcacagaaaagctaaacagaagcattctcagaaacttctttgtgatgtttgctttcaactcacagagttgaactttccttttgagagagaagctttgaaacactctttttctagaatctgcaagtggatatttggagggctttgaggcctgtggtggaaaaggaattatcttcccgtaagaactagatagatgcattctcagaaactactttgtgacgattgcattcaagtcacagaggtgaacattccctttcacagagcactttggaaactctccttgtgtagaatctgcaagtggagatatggaccgctttgaggcctatggtagtaaaggaaacagcttcatataaaaactagacagcagcattctcaggaaattctttgtgacgactgagtttaactcacagggctgaacattcctttggatggagcagtttggaaacacactatctgtaggatctgcaagcggatacttgggcctctctgaggatttcgttggaaacgggataaaccgcacagaactaaacagaagcattctcagaaccttcttcgtgacgtttgcattcaacccacagtgttgaacctttctttgatagttcaggtttgaaacactctttttgtagaaactgcaagtggataactgcacttctttgaggcctatcgtagtaaagggaataacttcctataaaaacaagacagaagctttctcagaaaattctctgggatgattgagttaaactcacagagcagtactttccttgggatggagtagtttcgaaacacactttctgtagaatctgcaagtggatatttggacctgtctgaggaattcgttgcaaacgggataatttcagctaagtaaacagaagcagtctcagaatcttcttgtgatgtttgcattcaaatcccagaattgaaccttcctttgaaagttcaggtttgaaacactctttttgaaggatctacaagtggatattcggaccactctgtggacttcgatcgaaacgggtatatcttcacataacatcaagacagaagcattcacagaaacttttctgtgatgactgcattcaactcacagagttgaacactccttttgagagcgcagttttgaaactctctttctctggaatctgcaaggggacatgcagaactctttgaaggtttcgttggaaacggaatcatcttcacataaaaattacacagaagcattctcaggaactccttggtgatgtttgtattcaacttccagagttgaactttccttcggaaagagcagctatgaaacactctttttctagaatctgcaagtggacattgggagggctgtgaggtttgtggtggaaatggaaatatctccacataaatactagatagaaggcttctcagaaactactttgtgatgattgcattcacctcacggagtggagcattcctattgacagagcagtttggaaacactcttgttgtagaatctgctagtggagatttggagcgctttgaggcctatggtagtaaagggaagagcttcacataaaatctagacagaagcattctcagaaaatactttgtgatgattgagattaacacacagagctgaacattcctttggatggagaaggtttgaaacacactttctgtagaatctgcgagtggatatttggacctctctgaggatttcgttggaaacgggataactgcacctaactaaacggaagcattctcacaaaattctttgtgatgtttgcattcaaatcccagagttgaaccttcctttgatagttcagctttgaaacaccctttttgtaggatctgcaagtggatatttggaccactctttggccttcgttcgaaacgggtacatcttcaaataaaatctagacagaagccttctcagaaacttctctgggatgattgcattcaactcaaagctttgaaccctcctatggatagtgcagttttgaatctctctttttgtggaatctgcaagtggatatgtggtactctttgaagttgtctttggaaacgggaatatcttcacataaaaactaaacagaagcattctcagaaacttctctgtgatgtttgtgttcaactcacagagtttcacgttgcttttcatagagcagatgagaaacacgcttttcgtagggtctgcaagtggacatttggagagatttcaggcctgtggtggaaaacgaattatcgtcacgtaaaaactagagagaagcattgtcagaaacttgtttgtgatgactgcattcaactcacagagttgaaggttccttttcaaacagcagtttccaaacactctttctgtggcatctgcaagtggatgtttgggcctctttgaagatttctttggaaacggaataatcttcacagaaaagctaaacagaagcattctcagaaacttctttgtgatgtttgctttcaactcacagagttgaactttccttttgagagagaagctttgaaacactctttttctagaatctgcaagtggatatttggagggctttgaggcctgtggtggaaaaggaattatcttcccgtaagaactagatagatgcattctcagaaactactttgtgacgattgcattcaagtcacagaggtgaacattccctttcagagagcactttggaagctctcgtgtagaatctgcaagtggagatatggaccgctttgaggcctatggtagtaaaggaaacagcttcatataaaaactagacagcagcattctcagaaaactctttgtgacgactgagtttaactcacagggctgaacattcctttggatggagcagtttggaaacacactatctgtaggatctgcaagcggatacttgggtctctctgaggatttccttggaaacgggataaacagcacagaactaaacagaagcattctcagaaccttcttcgtgacgtttgcattcaacccacagtgttgaacctttctttgatagttcaggtttgaaacactctttttgtagaaactgcaagaggataactgcacttctttgaggcctatcgtagtaaaggaaataacttcctataaaaacaagacagaagctttctcagaaaattctctgggatgattgagttgaactcacagagcagtactttccttgggatggagtagtttcaaaacacactttctgtagaatctgcaagtgggtatttggacctgtctgaggaattcgttgcaaacgggataatttcagcaaagtaaacagaagcagtctcagaatcttcttgtgatgtttgcattcaaatcccagaattgaaccttcctttgaaagttcaggttggaaacactctttttgcaggatctacaagtggatattgggaccactctgtgaacttcgttcgaaacgggtatatcttcacataacatctagacagaagcattctcagaaacttttctgtgatgactgcattcaactcacagagttgaacactccttttgagagcgcagttttgaaactctctttctctggaatctgcaaggggacatgcagacctctttgaaggtttcgttggaaacagaatcatcttcacataaaaattacacagaagcattctcaggaactccttggtgatgtttgtattcaacttccagagttgaactttccttctgaaagagcagctatgaaacactctttttctagaatctgcaagtggacattgggagggctgtgaggtttgtggtggaaaaggaaatatctccacataaatactagatagaaggcttctcagaaactactttgtgatgattgcattcacctcacggagtggagcattcctattgacagagcagtttggaaacactcttgttgtagaatctgctagtggagatttggagcgctttgaggcctatggtagtaaagggaagagcttcacataaaatctagacagaagcattctcagaaaatactttgtgatgattgagattaacacacagagctgaacattcctttggatggagaaggtttgaaacacactttctgtagaatctgcgagtggatatttggacctctctgaggatttcgttggaaacgggataactgcacctaactacacggaagcattctcacaaaattctttgtgatgtttgcattcaaatcccagagttgaaccttcctttgatagttcagctttgaaacactctttttgtaggatctgcaagtgcatatttagaccactctttggccttcgttcgaaacgggtacatcttcaaataaaatctagacagaagccttctcagaaacttctctgtgatgattgcattcaactcaaagcgttgaaccctcctatggatagagcagttttgaatctctctttttgtggaatctgcaagtggatatgtggtcctctttgaagatgtctttggaaacgggaatatgttcacataaaaactaaacagaagcattctcagaaacttctctgtgatgtttctgttcaactcacagagtttcacgttgctattcatagagcagatgagaaacatgcttttcgtagggtctgcaagtggacatttggagagatttcccacctgcggtggaaaacgaattatcgtcacgtaaaaactagagagaagcattgtcagaaacttgtttgtgatgactgcattcaactcacagagttgaaggttctttttcaaacagcagtttccaaacactctttctgtggcatctgcaagtggatgtttgggcctctttgaagatttcgttggaaacgggataatcttcacagaaaagctaaacagaagcattctcagaaacttctttgtgatgtttgctttcaactcacagagttgaaatttccttttgagagagaagctttgaaacactctttttctagaatctgcaagtggatatttggagggctttgaggcctgaggtggaaaaggaattatcttcccgtaagaactagatagatgcattctcagaaactactttgtgacgattgcattcaagtcacagaggtgaacattccctttcagagagcactttggaaactctcgttgtgtagaatctgcaagtggagatatggaccgctttgaggcctatggtagtaaaggaaacagcttcatataaaaactagacagcagcattctcagaaaactctttgtgacgactgagtttaactcacagggctgaacattcctttggatggagcagtttggaaacacactatctgtaggatctgcaagcggatacttgggcctctctgaggatttcgttggaaacgggataaaccgcacagaactaaacagaagcattctcagaaccttcttcgtgatgtttgcattcaacccacagtgttgaacctttctttgatagttcaggtttgaaacactctttttgtagaaactgcaagtggataactgcacttctttgaggcctatcgtagtaaaggaaataacttcctataaaaacaagacagaagctttctcagaaaattctctgggatgattgagttgaactcacagagcagtactttccttgggatggagtagtttcgaaacacactttctgtaaaatctgcaagtggatatttggacctgtctgaggaattcgttgcaaacgggataatttcagctaagtaaacagaagcagtctcagaatcttcttgtgatgtttgcattcaaatcccagaattgaaacttcctttgaaagttcaggttggaaacactctttttgcaggatctacaagtggatattcggaccactctgtggacttcgttcgaaacgggtatatcttcacataacatctagacagaagcattctcagaaacttttctgtgatgactgcattcaactcacagagttgaacactccttttgagagcgcagttttgaaactctctttctctggaatctgcaaggggacatgcagacctctttgaatgtttcattggaaacggaatcatcttcacataaaaattacacagaagcatcctcaggaactccttggtgatgtgtgtattcaacttccagagttgaactttccttcggaaagagcagctatgaaacactctttttctagaatctgcaagtggacattgggagggctgtgaggtttgtggtggaaaaggaaatatctccacgtaaatactagatagaagccttctcagaaactacgttgtgatgattgcattcacctcacggagtggagcattcctattgacagagcagtttggaaacactcttgttgtagaatctgctagtggagatttggagcgctttgaggcctatggtagtaaagggaagagcttcacataaaatctagacagaagcattctcagaaaatactttgtgatgattgagtttaacacacagagctgaacattcctttggatggagaagttttgaaacacactttctgtagaatctgcgagtggatatttggacctctctgaggatttcgttggaaacgggaaaactacacctaactaaacggaagcattctcacaaaattctttgtgatgtttgcattcaaatcccagagttgaaccttcctttgatagttcagctttgaaacaccctttttgtaggatctgcaagtggatatttggaccagtctttggccttcattcgaaacgggtacatcttcaaataaaatctagacagaagccttctcagaaacttctctgggatgcttgcattcaactcaaagcgttgaaccctcctatggatagagcagttttgaatctctctttttgtggaatctgcaagtggatatgtggtcctcttagaagttgtctttggaaacgggaatatcttcacataaaaactaaacagaagcattctcagaaacttctctgtgatgtttgtgttcaactcacagagtttcacgttgcttttcatagagcagatgagaaacatgcttttcgtagggtctgcaagtggacatttggagagatttcaggcctgtggtggaaaacgaattatcgtcacgtaaaaactagagagaagcattgtcagaaacttgtttgtgatgactgcattcaattcacagagttgaaggttccttttcaaacagcagtttccaaacactctttctgtggcatctgcaagtggatgtttgggcctctttgaagatttcgttggaaacgggataatcttcacagaaaagctaaacagaagcattctcagaaacttctttgtgatgtttgctttcaactcacagagttgaactttccttttgagagagaagctttgaaacactctttttctagaatctgcaagtggatatttggagggctttgaggcctgtggtggaaaaggaattatcttcccgtaagaactagatagatgcattctcagaaactactttgtgacgattgcattcaagtcacagaggtgaacattccctttcacagagcactttggaaactctcgttgtgtagaatctgcaagtggagatatggaccgctttgaggcctatggtagtaaaggaaacagcttcatataaaaactagacagcagcattctcagaaaactctttgtgacgactgagtttaactcatagggctgaacattcctttggatggagcagtttggaaacacactatctgtaggatctgcaagcggatacttgggcctccctgaggatttctttggaaacgggataaaccgcacagaactaaacagaagcattctcagaaccttcttcatgacgtttgcattcaacccacagtgttgaacctttctttgagagttcaggtttgaaacactctttttgtagagactgcaagtggataactgcacttctttgaggcctatcgtagtaaaggaaataacttcctataaaaacaagacagaagctttctcagaaaattctctgggatgattgagttgaactcacagagcagtactttccttgggatggagtagtttcgaaacacactttctgtaaaatctgcaagtggatatttggacctgtctgaggaattcgttgcaaacgggataatttcagctaagtaaacagaagcagtctcagaatcttcttctgatgtttgcattcaaatcccagaattgaaacttcctttgaaagttcaggttggaaacactctttttgcaggatctacaagtggatattcggaccactctgtggacttcgttcgaaacgggtatatcttcacataacatctagacagaagcattctcagaaacttttctgtgatgactgcattcaactcacagagttgaacactccttttgagagcgcagttttgaaactctctttctctggaatctgcaaggggacatgcagacccctttgaaggtttcgttggaaacggaatcatcttcacataaaaattacacagaagcatcctcaggaactccttggtgatgtgtgtattcaacttccagagttgaactttccttcggaaagagcagctatgaaacactctttttctagaatctgcaagtggacattgggagggctgtgaggtttgtggtggaaaaggaaatatctccacgtaaatactagatagaagccttctcagaaactacgttgtgatgattgcattcacctcacggagtggagcattcctattgacagagcagtttggaaacactcttgttgtagaatctgctagtggagatttggagcgctttgaggcctatggtagtaaagggaagagcttcacataaaatctagacagaagcattctcagaaaatactttgtgatgattgagattaacacacagagctgaacattcctttggatggagaaggtttgaaacacactttctgtagaatctgcgagtggatatttggacctctctgaggatttcgttggaaacgggataactgcacctaactaaacggaagcattctcacaaaattctttgtgatgtttgcattcaaatcccagagttgaaccttcctttgatagttcagctttgaaacaccctttttgtaggatctgcaagtggatatttggaccactctttggccttcgttcgaaacggttacatcttcaaataaaatctagacagaagccttctcagaaacttctctgggatgattgcattcaactcaaagcgttgaaccctcctgtggatagagcagttttgaatctctctttttgtggaatctgcaagtggatatgtggtcctctttgaagttgtctttggaaacgggaatatcttcacataaaaactaaacagaagcattctcagaaacttctctgtgatgtttgtgttcaactcacagagtttcacgttgcttttcatagagcagatgagaaacatgcttttcgcagggtctgcaagtggacatttggagagatttctggcctgtggtggaaaacgaattatcgtcacgtaaaaactagagagaagcattgtcagaaacttgtttgtgatgactgcattcaactcacagagttgaaggttccttttcaaacagcagtttccaaacactctttctgtggcatctgcaagtggatgtttgggcctctttgaagatttcgttggaaacgggataatcttcacagaaaagctaaacagaaacattctcagaaacttcttttgatgtttgctttcaactcacagagttgaactttccttttgagagagaagctttgaaacactctttttctagaatctgcaagtggatatttggagggctttgaggcctgtggtggaaaaggaattatcttcccgtaagaactagatagatgcattctcagaaactactttgtgacgattgcattcaagtcacagaggtgaacattccctttcacagagcactttggaaactctcgttgtgtagaatctgcaagtggagatatggaccgctttgaggcctatggtagtaaaggaaacagcttcatataaaaactagacagcagcattctcagaaaactctttctgacgactgagtttaactcacagggctgaacattcctttggatggagcagtttggaaacacactatctgtaggatctgcaagcggatacttgggcctctctgaggatttcgttggaaacgggataaaccgcacagaactaaacagaagcattctcagaacctccttcgtgacgtttgcattcaacccacagtgttgaacctttctttgatagttcaggtttgaaacactcttttagtagaaactgcaagtggataactgcacttctttgaggcctatcgtagtaaaggaaataacttcctataaaaacaagacagaagctttctcagaaaattctctgggatgattgagttgaactcacagagcagtactttccttgggatggagtagtttcgaaacacactttctgtagaatctgcaagtggatatttggacctgtctgaggaattcgttgcaaacgggataatttcagctaagtaaacagaagcagtctcagaatcttcttgtgatgtttgcattcaaatcccagaattgaaccttcctttgaaagttcaggtttgaaacactctttttgcaggatctacaagtggatattcggaccactctgtggacttcgatcgaaacgggtatatcttcacgtaacatctagacagaagcattctcagaaacttttctgtgatgactgcattcaactcacagagttgaacactccttttgagagcgcagttttgaaactctctttctctggaatctgcaaggggacatgcagacctctttgaaggtttcgttggaaacggaatcatcttcacataaaaattacacagaagcattctcaggaactccttggtgatgtttgtattcaacttccagagttgaactttccttcggaaagagcagctatgaaacactctttttctagaatctgcaagtggacattgggagggctgtgaggtttgtggtggaaaaggaaatatctccacgtaaatactagatagaagccttctcagaaactacgttgtgatgattgcattcaactcacggagtggagcattcctattgacagagcagtttggaaacactcttgttgtagaaactgctagtggatatttggagcgctttgaggcctatggtagtaaagggaagagcttcacataaaatcaagacagaagcattctcagaaaatactttgtgatgattgagtttaacacacagagctgaacattactttggatggagcaggtttgaaacacactttctatagaatctgcgagtggatatttggacctctctgaggatttcgttggaaacgggataactgcacctaactaaacggaagcattctcacaaaattcttcgtgatgtttgcattcaaatcccagagttgaaccttcctttgatagttcagctttgaaacactctttttgttggatctgcaagtggatatttggaccactctttggccttccttcgaaacgggtacatcttcatataaaatctagacagaagccttctcagaaacttctctgtgatgattgcattcaactgaaggcgttgaaccctcctatggatagggcagttttgaatctctctttttgtggaatctgcaagtggatatgtggtcctctttgaagatgtctttggaaacgggaatatcttcacataaaaactaaacagaagcattctcataaacttctctgtgatgtttgtgtccaaatcacagagtttcacgttgcttttcatagagcagatgagaaacatgcttttcgtagggtctgcaagtggacatttggagagatttcaggcctgtggtggaaaacgaattatcgtcacgtaaaaactagagggaagcattgtcagaaacttgtttgtgatgactgcattcaactcacagagttgaaggttccttttcaaacagcagtttccaaacactctttctgtggcatctgcaagtggatgtttgggcctctttgaagatttcgttggaaacgggataatcttcacagaaaagctaaacagaagcattctcagaaacttctttgtgatgtttgctttcaactcacagagttgaactttccttttgagagagaagctttgaaacactctttttctagaatctgcaagtggatatttggagggctttgaggcctgtggtggaaaaggaattatcttcccgtaagaactagatagatgcattctcagaaactactttgtgacgattgcattcaagtcacagaggtgaacattccctttcagagagcactttggaaactctctttgtgtagaatctgcaagtggagatatggaccgctttgaggcctatggtagtaaaggaaacagcttcatataaaaactagacagcagcattctcagaaaactctttctgacgactgagtgtaactcacagggttgaacattcctttggatggagcagtttggaaacacactatctgtaagatctgcaagcggatacttgggcctctctgaggatttcgttggaaacgggataaaccgcacagaactaaacagaagcattctcagaaccttcttcgtgacgtttgcattcaacccacagtgttgaacctttctttgatagttcaggtttgaaacactctttttgtagaaactgcaagtggataactgcacttctttgaggcctatcgtagtaaaggaaataacttcctataaaaacaagacagaagctttctcagaaaattctctgggatgattgagttgaactcacagagcagtactttccttgggatggagtagtttcgaaacacactttctgtagaatctgcaagtggatatttggacctgtctgaggaattcgttgcaaacgggataatttcagctaagtaaacagaagcagtctcagaatcttcttgtgatgtttgcattcaaatcccagaattgaaccttcctttgaaagttcaggttggaaacactctttttgcaggatctacaagtggatattcggaccactctgtggacttcgttcgaaacgggtatatcttcacataacatctagacagaagcattctcagaaacttttctgtgatgactgcattcaactcacagagttgaacactccttttgagagcgcagttttgaaactctctttctctggaatctgcaaagggacatgcagacctctttgaaggtttcgttggaaacggaatcatcttcacataaaaattacacagaagcattctcaggaactccttggtgatgtttgtattcaacttccagagttgaactttccttcggaaagagcagctatgaaacactctttttctagaatctgcaagtggacattgggagggctgtgaggtttgtggtggaaaaggaaatatctccacgtaaatactagatagaagccttctcagaaactactttgtgatgattgcattcacctcacagagtggagcattcctattgacagagcagtttggaaacactcttgttgtagaatctgctagtggagatttggagcgctttgaggcctatggtagtaaagggaagagcttcacataaaatcaagacagaagcattctcagaaaatactttgtgatgattgagtttaacacacagagctgaacattcctttggatggagcaggtttgaaacacactttctatagaatctgcgagtggatatttggacctctctgaggatttcgttggaaacgggataactgcacctaactaaacggtagcattctcacaaaattcttcgtgatgtttgcattcaaatcccagagttgaaccttcctttgatagttcaggtttgaaacactctttttgtaggatctgcaagtggatatttggaccactctttggccttccttcgaaacgggtacatcttcaaataaaatctagacagaagccttctcagaaacttctctgggatgattgcattcaactttgagttgaaccctgctatggatagagcagtttagaatctctctttttgtggaatctgcaagtggatatgtcgtcctccttgaagatgtctttggaaacgggaatatcttcacataaaaactaaacagaagcattctcagaaacttctctgtgatgtttgtgttcaaatcacagagtttcacgttgcttttcatagagcagatgagaaacatgcttttcgtagggtctgcaagtggacatttggagagatttcaagcctgtggtggaaaacgaattatcgtcacgtaaaaactagagggaagcattgtcagaaacttgtttgtgatgactgcattcaactcacagagttgaaggttccttttcaaacagcagtttccaaacactctttctgtggcatctgcaagtggatgtttgggcctctttgaagatttcgttggaaaagggataatcttcacagaaaagctaaacagaagcattctcagaaacctctttttgatgtttgctttaaactcacagagttgaactttccttttgagagagaagctttgaaacactctttttctagaatctgcaagtggatatttggagggctttgaggactgtggtggaaaaggaattatcttcccgttagaactagatagatgcattctcagaaactactttgtgacgattgcattcaagtcacagaggtgaacattccctttcacagagcactttggaaactctcgttgtgtagaatctgcaagtggagatatggaccgctttgaggcctacggcagtaaaggaaacagcttcatataaaaactagacagcagcattctcagaaaactctttctgacgactgagtgtaactcacagggttgaacattccttttgatggagcagtttggaaacacactatctgtaagatctgcaagcggatacttgggcctctctgaggatttcgttggaaacgggataaaccgcacagaactaaacagaagcattctcagaaccttcttcgtgacgtttgcattcaacccacagtgttgaacctttctttgatagttcaggtttgaaacactctttttgtagaaagtgcaagagtataactgcacttctttgaggcctatcgtagtaaaggaaataacttcctataaaaacaagacagaagctttctcagaaaattctctcagatgattcagttgaactcacagagcagtactttccttgggatggagtagtttcgaaacacactttctgtagaatctgcaagtggatatttggacctgtctgaggaattcnnnnnnnnnnnnnnnnnnnnnnnnnnnnnnnnnnnnnnnnnnnnnnnnnnnnnnnnnnnnnnnnnnnnnnnnnnnnnnnnnnnnnnnnnnnnnnnnnnnnnnnnnnnnnnnnnnnnnnnnnnnnnnnnnnnnnnnnnnnnnnnnnnnnnnnnnnnnnnnnnnnnnnnnnnnnnnnnnnnnnnnnnnnnnnnnnnnnnnnnnnnnnnnnnnnnnnnnnnnnnnnnnnnnnnnnnnnnnnnnnnnnnnnnnnnnnnnnnnnnnnnnnnnnnnnnnnnnnnnnnnnnnnnnnnnnnnnnnnnnnnnnnnnnnnnnnnnnnnnnnnnnnnnnnnnnnnnnnnnnnnnnnnnnnnnnnnnnnnnnnnnnnnnnnnnnnnnnnnnnnnnnnnnnnnnnnnnnnnnnnnnnnnnnnnnnnnnnnnnnnnnnnnnnnnnnnnnnnnnnnnnnnnnnnnnnnnnnnnnnnnnnnnnnnnnnnnnnnnnnnnnnnnnnnnnnnnnnnnnnnnnnnnnnnnnnnnnnnnnnnnnnnnnnnnnnnnnnnnnnnnnnnnnnnnnnnnnnnnnnnnnnnnnnnnnnnnnnnnnnnnnnnnnnnnnnnnnnnnnnnnnnnnnnnnnnnnnnnnnnnnnnnnnnnnnnnnnnnnnnnnnnnnnnnnnnnnnnnnnnnnnnnnnnnnnnnnnnnnnnnnnnnnnnnnnnnnnnnnnnnnnnnnnnnnnnnnnnnnnnnnnnnnnnnnnnnnnnnnnnnnnnnnnnnnnnnnnnnnnnnnnnnnnnnnnnnnnnnnnnnnnnnnnnnnnnnnnnnnnnnnnnnnnnnnnnnnnnnnnnnnnnnnnnnnnnnnnnnnnnnnnnnnnnnnnnnnnnnnnnnnnnnnnnnnnnnnnnnnnnnnnnnnnnnnnnnnnnnnnnnnnnnnnnnnnnnnnnnnnnnnnnnnnnnnnnnnnnnnnnnnnnnnnnnnnnnnnnnnnnnnnnnnnnnnnnnnnnnnnnnnnnnnnnnnnnnnnnnnnnnnnnnnnnnnnnnnnnnnnnnnnnnnnnnnnnnnnnnnnnnnnnnnnnnnnnnnnnnnnnnnnnnnnnnnnnnnnnnnnnnnnnnnnnnnnnnnnnnnnnnnnnnnnnnnnnnnnnnnnnnnnnnnnnnnnnnnnnnnnnnnnnnnnnnnnnnnnnnnnnnnnnnnnnnnnnnnnnnnnnnnnnnnnnnnnnnnnnnnnnnnnnnnnnnnnnnnnnnnnnnnnnnnnnnnnnnnnnnnnnnnnnnnnnnnnnnnnnnnnnnnnnnnnnnnnnnnnnnnnnnnnnnnnnnnnnnnnnnnnnnnnnnnnnnnnnnnnnnnnnnnnnnnnnnnnnnnnnnnnnnnnnnnnnnnnnnnnnnnnnnnnnnnnnnnnnnnnnnnnnnnnnnnnnnnnnnnnnnnnnnnnnnnnnnnnnnnnnnnnnnnnnnnnnnnnnnnnnnnnnnnnnnnnnnnnnnnnnnnnnnnnnnnnnnnnnnnnnnnnnnnnnnnnnnnnnnnnnnnnnnnnnnnnnnnnnnnnnnnnnnnnnnnnnnnnnnnnnnnnnnnnnnnnnnnnnnnnnnnnnnnnnnnnnnnnnnnnnnnnnnnnnnnnnnnnnnnnnnnnnnnnnnnnnnnnnnnnnnnnnnnnnnnnnnnnnnnnnnnnnnnnnnnnnnnnnnnnnnnnnnnnnnnnnnnnnnnnnnnnnnnnnnnnnnnnnnnnnnnnnnnnnnnnnnnnnnnnnnnnnnnnnnnnnnnnnnnnnnnnnnnnnnnnnnnnnnnnnnnnnnnnnnnnnnnnnnnnnnnnnnnnnnnnnnnnnnnnnnnnnnnnnnnnnnnnnnnnnnnnnnnnnnnnnnnnnnnnnnnnnnnnnnnnnnnnnnnnnnnnnnnnnnnnnnnnnnnnnnnnnnnnnnnnnnnnnnnnnnnnnnnnnnnnnnnnnnnnnnnnnnnnnnnnnnnnnnnnnnnnnnnnnnnnnnnnnnnnnnnnnnnnnnnnnnnnnnnnnnnnnnnnnnnnnnnnnnnnnnnnnnnnnnnnnnnnnnnnnnnnnnnnnnnnnnnnnnnnnnnnnnnnnnnnnnnnnnnnnnnnnnnnnnnnnnnnnnnnnnnnnnnnnnnnnnnnnnnnnnnnnnnnnnnnnnnnnnnnnnnnnnnnnnnnnnnnnnnnnnnnnnnnnnnnnnnnnnnnnnnnnnnnnnnnnnnnnnnnnnnnnnnnnnnnnnnnnnnnnnnnnnnnnnnnnnnnnnnnnnnnnnnnnnnnnnnnnnnnnnnnnnnnnnnnnnnnnnnnnnnnnnnnnnnnnnnnnnnnnnnnnnnnnnnnnnnnnnnnnnnnnnnnnnnnnnnnnnnnnnnnnnnnnnnnnnnnnnnnnnnnnnnnnnnnnnnnnnnnnnnnnnnnnnnnnnnnnnnnnnnnnnnnnnnnnnnnnnnnnnnnnnnnnnnnnnnnnnnnnnnnnnnnnnnnnnnnnnnnnnnnnnnnnnnnnnnnnnnnnnnnnnnnnnnnnnnnnnnnnnnnnnnnnnnnnnnnnnnnnnnnnnnnnnnnnnnnnnnnnnnnnnnnnnnnnnnnnnnnnnnnnnnnnnnnnnnnnnnnnnnnnnnnnnnnnnnnnnnnnnnnnnnnnnnnnnnnnnnnnnnnnnnnnnnnnnnnnnnnnnnnnnnnnnnnnnnnnnnnnnnnnnnnnnnnnnnnnnnnnnnnnnnnnnnnnnnnnnnnnnnnnnnnnnnnnnnnnnnnnnnnnnnnnnnnnnnnnnnnnnnnnnnnnnnnnnnnnnnnnnnnnnnnnnnnnnnnnnnnnnnnnnnnnnnnnnnnnnnnnnnnnnnnnnnnnnnnnnnnnnnnnnnnnnnnnnnnnnnnnnnnnnnnnnnnnnnnnnnnnnnnnnnnnnnnnnnnnnnnnnnnnnnnnnnnnnnnnnnnnnnnnnnnnnnnnnnnnnnnnnnnnnnnnnnnnnnnnnnnnnnnnnnnnnnnnnnnnnnnnnnnnnnnnnnnnnnnnnnnnnnnnnnnnnnnnnnnnnnnnnnnnnnnnnnnnnnnnnnnnnnnnnnnnnnnnnnnnnnnnnnnnnnnnnnnnnnnnnnnnnnnnnnnnnnnnnnnnnnnnnnnnnnnnnnnnnnnnnnnnnnnnnnnnnnnnnnnnnnnnnnnnnnnnnnnnnnnnnnnnnnnnnnnnnnnnnnnnnnnnnnnnnnnnnnnnnnnnnnnnnnnnnnnnnnnnnnnnnnnnnnnnnnnnnnnnnnnnnnnnnnnnnnnnnnnnnnnnnnnnnnnnnnnnnnnnnnnnnnnnnnnnnnnnnnnnnnnnnnnnnnnnnnnnnnnnnnnnnnnnnnnnnnnnnnnnnnnnnnnnnnnnnnnnnnnnnnnnnnnnnnnnnnnnnnnnnnnnnnnnnnnnnnnnnnnnnnnnnnnnnnnnnnnnnnnnnnnnnnnnnnnnnnnnnnnnnnnnnnnnnnnnnnnnnnnnnnnnnnnnnnnnnnnnnnnnnnnnnnnnnnnnnnnnnnnnnnnnnnnnnnnnnnnnnnnnnnnnnnnnnnnnnnnnnnnnnnnnnnnnnnnnnnnnnnnnnnnnnnnnnnnnnnnnnnnnnnnnnnnnnnnnnnnnnnnnnnnnnnnnnnnnnnnnnnnnnnnnnnnnnnnnnnnnnnnnnnnnnnnnnnnnnnnnnnnnnnnnnnnnnnnnnnnnnnnnnnnnnnnnnnnnnnnnnnnnnnnnnnnnnnnnnnnnnnnnnnnnnnnnnnnnnnnnnnnnnnnnnnnnnnnnnnnnnnnnnnnnnnnnnnnnnnnnnnnnnnnnnnnnnnnnnnnnnnnnnnnnnnnnnnnnnnnnnnnnnnnnnnnnnnnnnnnnnnnnnnnnnnnnnnnnnnnnnnnnnnnnnnnnnnnnnnnnnnnnnnnnnnnnnnnnnnnnnnnnnnnnnnnnnnnnnnnnnnnnnnnnnnnnnnnnnnnnnnnnnnnnnnnnnnnnnnnnnnnnnnnnnnnnnnnnnnnnnnnnnnnnnnnnnnnnnnnnnnnnnnnnnnnnnnnnnnnnnnnnnnnnnnnnnnnnnnnnnnnnnnnnnnnnnnnnnnnnnnnnnnnnnnnnnnnnnnnnnnnnnnnnnnnnnnnnnnnnnnnnnnnnnnnnnnnnnnnnnnnnnnnnnnnnnnnnnnnnnnnnnnnnnnnnnnnnnnnnnnnnnnnnnnnnnnnnnnnnnnnnnnnnnnnnnnnnnnnnnnnnnnnnnnnnnnnnnnnnnnnnnnnnnnnnnnnnnnnnnnnnnnnnnnnnnnnnnnnnnnnnnnnnnnnnnnnnnnnnnnnnnnnnnnnnnnnnnnnnnnnnnnnnnnnnnnnnnnnnnnnnnnnnnnnnnnnnnnnnnnnnnnnnnnnnnnnnnnnnnnnnnnnnnnnnnnnnnnnnnnnnnnnnnnnnnnnnnnnnnnnnnnnnnnnnnnnnnnnnnnnnnnnnnnnnnnnnnnnnnnnnnnnnnnnnnnnnnnnnnnnnnnnnnnnnnnnnnnnnnnnnnnnnnnnnnnnnnnnnnnnnnnnnnnnnnnnnnnnnnnnnnnnnnnnnnnnnnnnnnnnnnnnnnnnnnnnnnnnnnnnnnnnnnnnnnnnnnnnnnnnnnnnnnnnnnnnnnnnnnnnnnnnnnnnnnnnnnnnnnnnnnnnnnnnnnnnnnnnnnnnnnnnnnnnnnnnnnnnnnnnnnnnnnnnnnnnnnnnnnnnnnnnnnnnnnnnnnnnnnnnnnnnnnnnnnnnnnnnnnnnnnnnnnnnnnnnnnnnnnnnnnnnnnnnnnnnnnnnnnnnnnnnnnnnnnnnnnnnnnnnnnnnnnnnnnnnnnnnnnnnnnnnnnnnnnnnnnnnnnnnnnnnnnnnnnnnnnnnnnnnnnnnnnnnnnnnnnnnnnnnnnnnnnnnnnnnnnnnnnnnnnnnnnnnnnnnnnnnnnnnnnnnnnnnnnnnnnnnnnnnnnnnnnnnnnnnnnnnnnnnnnnnnnnnnnnnnnnnnnnnnnnnnnnnnnnnnnnnnnnnnnnnnnnnnnnnnnnnnnnnnnnnnnnnnnnnnnnnnnnnnnnnnnnnnnnnnnnnnnnnnnnnnnnnnnnnnnnnnnnnnnnnnnnnnnnnnnnnnnnnnnnnnnnnnnnnnnnnnnnnnnnnnnnnnnnnnnnnnnnnnnnnnnnnnnnnnnnnnnnnnnnnnnnnnnnnnnnnnnnnnnnnnnnnnnnnnnnnnnnnnnnnnnnnnnnnnnnnnnnnnnnnnnnnnnnnnnnnnnnnnnnnnnnnnnnnnnnnnnnnnnnnnnnnnnnnnnnnnnnnnnnnnnnnnnnnnnnnnnnnnnnnnnnnnnnnnnnnnnnnnnnnnnnnnnnnnnnnnnnnnnnnnnnnnnnnnnnnnnnnnnnnnnnnnnnnnnnnnnnnnnnnnnnnnnnnnnnnnnnnnnnnnnnnnnnnnnnnnnnnnnnnnnnnnnnnnnnnnnnnnnnnnnnnnnnnnnnnnnnnnnnnnnnnnnnnnnnnnnnnnnnnnnnnnnnnnnnnnnnnnnnnnnnnnnnnnnnnnnnnnnnnnnnnnnnnnnnnnnnnnnnnnnnnnnnnnnnnnnnnnnnnnnnnnnnnnnnnnnnnnnnnnnnnnnnnnnnnnnnnnnnnnnnnnnnnnnnnnnnnnnnnnnnnnnnnnnnnnnnnnnnnnnnnnnnnnnnnnnnnnnnnnnnnnnnnnnnnnnnnnnnnnnnnnnnnnnnnnnnnnnnnnnnnnnnnnnnnnnnnnnnnnnnnnnnnnnnnnnnnnnnnnnnnnnnnnnnnnnnnnnnnnnnnnnnnnnnnnnnnnnnnnnnnnnnnnnnnnnnnnnnnnnnnnnnnnnnnnnnnnnnnnnnnnnnnnnnnnnnnnnnnnnnnnnnnnnnnnnnnnnnnnnnnnnnnnnnnnnnnnnnnnnnnnnnnnnnnnnnnnnnnnnnnnnnnnnnnnnnnnnnnnnnnnnnnnnnnnnnnnnnnnnnnnnnnnnnnnnnnnnnnnnnnnnnnnnnnnnnnnnnnnnnnnnnnnnnnnnnnnnnnnnnnnnnnnnnnnnnnnnnnnnnnnnnnnnnnnnnnnnnnnnnnnnnnnnnnnnnnnnnnnnnnnnnnnnnnnnnnnnnnnnnnnnnnnnnnnnnnnnnnnnnnnnnnnnnnnnnnnnnnnnnnnnnnnnnnnnnnnnnnnnnnnnnnnnnnnnnnnnnnnnnnnnnnnnnnnnnnnnnnnnnnnnnnnnnnnnnnnnnnnnnnnnnnnnnnnnnnnnnnnnnnnnnnnnnnnnnnnnnnnnnnnnnnnnnnnnnnnnnnnnnnnnnnnnnnnnnnnnnnnnnnnnnnnnnnnnnnnnnnnnnnnnnnnnnnnnnnnnnnnnnnnnnnnnnnnnnnnnnnnnnnnnnnnnnnnnnnnnnnnnnnnnnnnnnnnnnnnnnnnnnnnnnnnnnnnnnnnnnnnnnnnnnnnnnnnnnnnnnnnnnnnnnnnnnnnnnnnnnnnnnnnnnnnnnnnnnnnnnnnnnnnnnnnnnnnnnnnnnnnnnnnnnnnnnnnnnnnnnnnnnnnnnnnnnnnnnnnnnnnnnnnnnnnnnnnnnnnnnnnnnnnnnnnnnnnnnnnnnnnnnnnnnnnnnnnnnnnnnnnnnnnnnnnnnnnnnnnnnnnnnnnnnnnnnnnnnnnnnnnnnnnnnnnnnnnnnnnnnnnnnnnnnnnnnnnnnnnnnnnnnnnnnnnnnnnnnnnnnnnnnnnnnnnnnnnnnnnnnnnnnnnnnnnnnnnnnnnnnnnnnnnnnnnnnnnnnnnnnnnnnnnnnnnnnnnnnnnnnnnnnnnnnnnnnnnnnnnnnnnnnnnnnnnnnnnnnnnnnnnnnnnnnnnnnnnnnnnnnnnnnnnnnnnnnnnnnnnnnnnnnnnnnnnnnnnnnnnnnnnnnnnnnnnnnnnnnnnnnnnnnnnnnnnnnnnnnnnnnnnnnnnnnnnnnnnnnnnnnnnnnnnnnnnnnnnnnnnnnnnnnnnnnnnnnnnnnnnnnnnnnnnnnnnnnnnnnnnnnnnnnnnnnnnnnnnnnnnnnnnnnnnnnnnnnnnnnnnnnnnnnnnnnnnnnnnnnnnnnnnnnnnnnnnnnnnnnnnnnnnnnnnnnnnnnnnnnnnnnnnnnnnnnnnnnnnnnnnnnnnnnnnnnnnnnnnnnnnnnnnnnnnnnnnnnnnnnnnnnnnnnnnnnnnnnnnnnnnnnnnnnnnnnnnnnnnnnnnnnnnnnnnnnnnnnnnnnnnnnnnnnnnnnnnnnnnnnnnnnnnnnnnnnnnnnnnnnnnnnnnnnnnnnnnnnnnnnnnnnnnnnnnnnnnnnnnnnnnnnnnnnnnnnnnnnnnnnnnnnnnnnnnnnnnnnnnnnnnnnnnnnnnnnnnnnnnnnnnnnnnnnnnnnnnnnnnnnnnnnnnnnnnnnnnnnnnnnnnnnnnnnnnnnnnnnnnnnnnnnnnnnnnnnnnnnnnnnnnnnnnnnnnnnnnnnnnnnnnnnnnnnnnnnnnnnnnnnnnnnnnnnnnnnnnnnnnnnnnnnnnnnnnnnnnnnnnnnnnnnnnnnnnnnnnnnnnnnnnnnnnnnnnnnnnnnnnnnnnnnnnnnnnnnnnnnnnnnnnnnnnnnnnnnnnnnnnnnnnnnnnnnnnnnnnnnnnnnnnnnnnnnnnnnnnnnnnnnnnnnnnnnnnnnnnnnnnnnnnnnnnnnnnnnnnnnnnnnnnnnnnnnnnnnnnnnnnnnnnnnnnnnnnnnnnnnnnnnnnnnnnnnnnnnnnnnnnnnnnnnnnnnnnnnnnnnnnnnnnnnnnnnnnnnnnnnnnnnnnnnnnnnnnnnnnnnnnnnnnnnnnnnnnnnnnnnnnnnnnnnnnnnnnnnnnnnnnnnnnnnnnnnnnnnnnnnnnnnnnnnnnnnnnnnnnnnnnnnnnnnnnnnnnnnnnnnnnnnnnnnnnnnnnnnnnnnnnnnnnnnnnnnnnnnnnnnnnnnnnnnnnnnnnnnnnnnnnnnnnnnnnnnnnnnnnnnnnnnnnnnnnnnnnnnnnnnnnnnnnnnnnnnnnnnnnnnnnnnnnnnnnnnnnnnnnnnnnnnnnnnnnnnnnnnnnnnnnnnnnnnnnnnnnnnnnnnnnnnnnnnnnnnnnnnnnnnnnnnnnnnnnnnnnnnnnnnnnnnnnnnnnnnnnnnnnnnnnnnnnnnnnnnnnnnnnnnnnnnnnnnnnnnnnnnnnnnnnnnnnnnnnnnnnnnnnnnnnnnnnnnnnnnnnnnnnnnnnnnnnnnnnnnnnnnnnnnnnnnnnnnnnnnnnnnnnnnnnnnnnnnnnnnnnnnnnnnnnnnnnnnnnnnnnnnnnnnnnnnnnnnnnnnnnnnnnnnnnnnnnnnnnnnnnnnnnnnnnnnnnnnnnnnnnnnnnnnnnnnnnnnnnnnnnnnnnnnnnnnnnnnnnnnnnnnnnnnnnnnnnnnnnnnnnnnnnnnnnnnnnnnnnnnnnnnnnnnnnnnnnnnnnnnnnnnnnnnnnnnnnnnnnnnnnnnnnnnnnnnnnnnnnnnnnnnnnnnnnnnnnnnnnnnnnnnnnnnnnnnnnnnnnnnnnnnnnnnnnnnnnnnnnnnnnnnnnnnnnnnnnnnnnnnnnnnnnnnnnnnnnnnnnnnnnnnnnnnnnnnnnnnnnnnnnnnnnnnnnnnnnnnnnnnnnnnnnnnnnnnnnnnnnnnnnnnnnnnnnnnnnnnnnnnnnnnnnnnnnnnnnnnnnnnnnnnnnnnnnnnnnnnnnnnnnnnnnnnnnnnnnnnnnnnnnnnnnnnnnnnnnnnnnnnnnnnnnnnnnnnnnnnnnnnnnnnnnnnnnnnnnnnnnnnnnnnnnnnnnnnnnnnnnnnnnnnnnnnnnnnnnnnnnnnnnnnnnnnnnnnnnnnnnnnnnnnnnnnnnnnnnnnnnnnnnnnnnnnnnnnnnnnnnnnnnnnnnnnnnnnnnnnnnnnnnnnnnnnnnnnnnnnnnnnnnnnnnnnnnnnnnnnnnnnnnnnnnnnnnnnnnnnnnnnnnnnnnnnnnnnnnnnnnnnnnnnnnnnnnnnnnnnnnnnnnnnnnnnnnnnnnnnnnnnnnnnnnnnnnnnnnnnnnnnnnnnnnnnnnnnnnnnnnnnnnnnnnnnnnnnnnnnnnnnnnnnnnnnnnnnnnnnnnnnnnnnnnnnnnnnnnnnnnnnnnnnnnnnnnnnnnnnnnnnnnnnnnnnnnnnnnnnnnnnnnnnnnnnnnnnnnnnnnnnnnnnnnnnnnnnnnnnnnnnnnnnnnnnnnnnnnnnnnnnnnnnnnnnnnnnnnnnnnnnnnnnnnnnnnnnnnnnnnnnnnnnnnnnnnnnnnnnnnnnnnnnnnnnnnnnnnnnnnnnnnnnnnnnnnnnnnnnnnnnnnnnnnnnnnnnnnnnnnnnnnnnnnnnnnnnnnnnnnnnnnnnnnnnnnnnnnnnnnnnnnnnnnnnnnnnnnnnnnnnnnnnnnnnnnnnnnnnnnnnnnnnnnnnnnnnnnnnnnnnnnnnnnnnnnnnnnnnnnnnnnnnnnnnnnnnnnnnnnnnnnnnnnnnnnnnnnnnnnnnnnnnnnnnnnnnnnnnnnnnnnnnnnnnnnnnnnnnnnnnnnnnnnnnnnnnnnnnnnnnnnnnnnnnnnnnnnnnnnnnnnnnnnnnnnnnnnnnnnnnnnnnnnnnnnnnnnnnnnnnnnnnnnnnnnnnnnnnnnnnnnnnnnnnnnnnnnnnnnnnnnnnnnnnnnnnnnnnnnnnnnnnnnnnnnnnnnnnnnnnnnnnnnnnnnnnnnnnnnnnnnnnnnnnnnnnnnnnnnnnnnnnnnnnnnnnnnnnnnnnnnnnnnnnnnnnnnnnnnnnnnnnnnnnnnnnnnnnnnnnnnnnnnnnnnnnnnnnnnnnnnnnnnnnnnnnnnnnnnnnnnnnnnnnnnnnnnnnnnnnnnnnnnnnnnnnnnnnnnnnnnnnnnnnnnnnnnnnnnnnnnnnnnnnnnnnnnnnnnnnnnnnnnnnnnnnnnnnnnnnnnnnnnnnnnnnnnnnnnnnnnnnnnnnnnnnnnnnnnnnnnnnnnnnnnnnnnnnnnnnnnnnnnnnnnnnnnnnnnnnnnnnnnnnnnnnnnnnnnnnnnnnnnnnnnnnnnnnnnnnnnnnnnnnnnnnnnnnnnnnnnnnnnnnnnnnnnnnnnnnnnnnnnnnnnnnnnnnnnnnnnnnnnnnnnnnnnnnnnnnnnnnnnnnnnnnnnnnnnnnnnnnnnnnnnnnnnnnnnnnnnnnnnnnnnnnnnnnnnnnnnnnnnnnnnnnnnnnnnnnnnnnnnnnnnnnnnnnnnnnnnnnnnnnnnnnnnnnnnnnnnnnnnnnnnnnnnnnnnnnnnnnnnnnnnnnnnnnnnnnnnnnnnnnnnnnnnnnnnnnnnnnnnnnnnnnnnnnnnnnnnnnnnnnnnnnnnnnnnnnnnnnnnnnnnnnnnnnnnnnnnnnnnnnnnnnnnnnnnnnnnnnnnnnnnnnnnnnnnnnnnnnnnnnnnnnnnnnnnnnnnnnnnnnnnnnnnnnnnnnnnnnnnnnnnnnnnnnnnnnnnnnnnnnnnnnnnnnnnnnnnnnnnnnnnnnnnnnnnnnnnnnnnnnnnnnnnnnnnnnnnnnnnnnnnnnnnnnnnnnnnnnnnnnnnnnnnnnnnnnnnnnnnnnnnnnnnnnnnnnnnnnnnnnnnnnnnnnnnnnnnnnnnnnnnnnnnnnnnnnnnnnnnnnnnnnnnnnnnnnnnnnnnnnnnnnnnnnnnnnnnnnnnnnnnnnnnnnnnnnnnnnnnnnnnnnnnnnnnnnnnnnnnnnnnnnnnnnnnnnnnnnnnnnnnnnnnnnnnnnnnnnnnnnnnnnnnnnnnnnnnnnnnnnnnnnnnnnnnnnnnnnnnnnnnnnnnnnnnnnnnnnnnnnnnnnnnnnnnnnnnnnnnnnnnnnnnnnnnnnnnnnnnnnnnnnnnnnnnnnnnnnnnnnnnnnnnnnnnnnnnnnnnnnnnnnnnnnnnnnnnnnnnnnnnnnnnnnnnnnnnnnnnnnnnnnnnnnnnnnnnnnnnnnnnnnnnnnnnnnnnnnnnnnnnnnnnnnnnnnnnnnnnnnnnnnnnnnnnnnnnnnnnnnnnnnnnnnnnnnnnnnnnnnnnnnnnnnnnnnnnnnnnnnnnnnnnnnnnnnnnnnnnnnnnnnnnnnnnnnnnnnnnnnnnnnnnnnnnnnnnnnnnnnnnnnnnnnnnnnnnnnnnnnnnnnnnnnnnnnnnnnnnnnnnnnnnnnnnnnnnnnnnnnnnnnnnnnnnnnnnnnnnnnnnnnnnnnnnnnnnnnnnnnnnnnnnnnnnnnnnnnnnnnnnnnnnnnnnnnnnnnnnnnnnnnnnnnnnnnnnnnnnnnnnnnnnnnnnnnnnnnnnnnnnnnnnnnnnnnnnnnnnnnnnnnnnnnnnnnnnnnnnnnnnnnnnnnnnnnnnnnnnnnnnnnnnnnnnnnnnnnnnnnnnnnnnnnnnnnnnnnnnnnnnnnnnnnnnnnnnnnnnnnnnnnnnnnnnnnnnnnnnnnnnnnnnnnnnnnnnnnnnnnnnnnnnnnnnnnnnnnnnnnnnnnnnnnnnnnnnnnnnnnnnnnnnnnnnnnnnnnnnnnnnnnnnnnnnnnnnnnnnnnnnnnnnnnnnnnnnnnnnnnnnnnnnnnnnnnnnnnnnnnnnnnnnnnnnnnnnnnnnnnnnnnnnnnnnnnnnnnnnnnnnnnnnnnnnnnnnnnnnnnnnnnnnnnnnnnnnnnnnnnnnnnnnnnnnnnnnnnnnnnnnnnnnnnnnnnnnnnnnnnnnnnnnnnnnnnnnnnnnnnnnnnnnnnnnnnnnnnnnnnnnnnnnnnnnnnnnnnnnnnnnnnnnnnnnnnnnnnnnnnnnnnnnnnnnnnnnnnnnnnnnnnnnnnnnnnnnnnnnnnnnnnnnnnnnnnnnnnnnnnnnnnnnnnnnnnnnnnnnnnnnnnnnnnnnnnnnnnnnnnnnnnnnnnnnnnnnnnnnnnnnnnnnnnnnnnnnnnnnnnnnnnnnnnnnnnnnnnnnnnnnnnnnnnnnnnnnnnnnnnnnnnnnnnnnnnnnnnnnnnnnnnnnnnnnnnnnnnnnnnnnnnnnnnnnnnnnnnnnnnnnnnnnnnnnnnnnnnnnnnnnnnnnnnnnnnnnnnnnnnnnnnnnnnnnnnnnnnnnnnnnnnnnnnnnnnnnnnnnnnnnnnnnnnnnnnnnnnnnnnnnnnnnnnnnnnnnnnnnnnnnnnnnnnnnnnnnnnnnnnnnnnnnnnnnnnnnnnnnnnnnnnnnnnnnnnnnnnnnnnnnnnnnnnnnnnnnnnnnnnnnnnnnnnnnnnnnnnnnnnnnnnnnnnnnnnnnnnnnnnnnnnnnnnnnnnnnnnnnnnnnnnnnnnnnnnnnnnnnnnnnnnnnnnnnnnnnnnnnnnnnnnnnnnnnnnnnnnnnnnnnnnnnnnnnnnnnnnnnnnnnnnnnnnnnnnnnnnnnnnnnnnnnnnnnnnnnnnnnnnnnnnnnnnnnnnnnnnnnnnnnnnnnnnnnnnnnnnnnnnnnnnnnnnnnnnnnnnnnnnnnnnnnnnnnnnnnnnnnnnnnnnnnnnnnnnnnnnnnnnnnnnnnnnnnnnnnnnnnnnnnnnnnnnnnnnnnnnnnnnnnnnnnnnnnnnnnnnnnnnnnnnnnnnnnnnnnnnnnnnnnnnnnnnnnnnnnnnnnnnnnnnnnnnnnnnnnnnnnnnnnnnnnnnnnnnnnnnnnnnnnnnnnnnnnnnnnnnnnnnnnnnnnnnnnnnnnnnnnnnnnnnnnnnnnnnnnnnnnnnnnnnnnnnnnnnnnnnnnnnnnnnnnnnnnnnnnnnnnnnnnnnnnnnnnnnnnnnnnnnnnnnnnnnnnnnnnnnnnnnnnnnnnnnnnnnnnnnnnnnnnnnnnnnnnnnnnnnnnnnnnnnnnnnnnnnnnnnnnnnnnnnnnnnnnnnnnnnnnnnnnnnnnnnnnnnnnnnnnnnnnnnnnnnnnnnnnnnnnnnnnnnnnnnnnnnnnnnnnnnnnnnnnnnnnnnnnnnnnnnnnnnnnnnnnnnnnnnnnnnnnnnnnnnnnnnnnnnnnnnnnnnnnnnnnnnnnnnnnnnnnnnnnnnnnnnnnnnnnnnnnnnnnnnnnnnnnnnnnnnnnnnnnnnnnnnnnnnnnnnnnnnnnnnnnnnnnnnnnnnnnnnnnnnnnnnnnnnnnnnnnnnnnnnnnnnnnnnnnnnnnnnnnnnnnnnnnnnnnnnnnnnnnnnnnnnnnnnnnnnnnnnnnnnnnnnnnnnnnnnnnnnnnnnnnnnnnnnnnnnnnnnnnnnnnnnnnnnnnnnnnnnnnnnnnnnnnnnnnnnnnnnnnnnnnnnnnnnnnnnnnnnnnnnnnnnnnnnnnnnnnnnnnnnnnnnnnnnnnnnnnnnnnnnnnnnnnnnnnnnnnnnnnnnnnnnnnnnnnnnnnnnnnnnnnnnnnnnnnnnnnnnnnnnnnnnnnnnnnnnnnnnnnnnnnnnnnnnnnnnnnnnnnnnnnnnnnnnnnnnnnnnnnnnnnnnnnnnnnnnnnnnnnnnnnnnnnnnnnnnnnnnnnnnnnnnnnnnnnnnnnnnnnnnnnnnnnnnnnnnnnnnnnnnnnnnnnnnnnnnnnnnnnnnnnnnnnnnnnnnnnnnnnnnnnnnnnnnnnnnnnnnnnnnnnnnnnnnnnnnnnnnnnnnnnnnnnnnnnnnnnnnnnnnnnnnnnnnnnnnnnnnnnnnnnnnnnnnnnnnnnnnnnnnnnnnnnnnnnnnnnnnnnnnnnnnnnnnnnnnnnnnnnnnnnnnnnnnnnnnnnnnnnnnnnnnnnnnnnnnnnnnnnnnnnnnnnnnnnnnnnnnnnnnnnnnnnnnnnnnnnnnnnnnnnnnnnnnnnnnnnnnnnnnnnnnnnnnnnnnnnnnnnnnnnnnnnnnnnnnnnnnnnnnnnnnnnnnnnnnnnnnnnnnnnnnnnnnnnnnnnnnnnnnnnnnnnnnnnnnnnnnnnnnnnnnnnnnnnnnnnnnnnnnnnnnnnnnnnnnnnnnnnnnnnnnnnnnnnnnnnnnnnnnnnnnnnnnnnnnnnnnnnnnnnnnnnnnnnnnnnnnnnnnnnnnnnnnnnnnnnnnnnnnnnnnnnnnnnnnnnnnnnnnnnnnnnnnnnnnnnnnnnnnnnnnnnnnnnnnnnnnnnnnnnnnnnnnnnnnnnnnnnnnnnnnnnnnnnnnnnnnnnnnnnnnnnnnnnnnnnnnnnnnnnnnnnnnnnnnnnnnnnnnnnnnnnnnnnnnnnnnnnnnnnnnnnnnnnnnnnnnnnnnnnnnnnnnnnnnnnnnnnnnnnnnnnnnnnnnnnnnnnnnnnnnnnnnnnnnnnnnnnnnnnnnnnnnnnnnnnnnnnnnnnnnnnnnnnnnnnnnnnnnnnnnnnnnnnnnnnnnnnnnnnnnnnnnnnnnnnnnnnnnnnnnnnnnnnnnnnnnnnnnnnnnnnnnnnnnnnnnnnnnnnnnnnnnnnnnnnnnnnnnnnnnnnnnnnnnnnnnnnnnnnnnnnnnnnnnnnnnnnnnnnnnnnnnnnnnnnnnnnnnnnnnnnnnnnnnnnnnnnnnnnnnnnnnnnnnnnnnnnnnnnnnnnnnnnnnnnnnnnnnnnnnnnnnnnnnnnnnnnnnnnnnnnnnnnnnnnnnnnnnnnnnnnnnnnnnnnnnnnnnnnnnnnnnnnnnnnnnnnnnnnnnnnnnnnnnnnnnnnnnnnnnnnnnnnnnnnnnnnnnnnnnnnnnnnnnnnnnnnnnnnnnnnnnnnnnnnnnnnnnnnnnnnnnnnnnnnnnnnnnnnnnnnnnnnnnnnnnnnnnnnnnnnnnnnnnnnnnnnnnnnnnnnnnnnnnnnnnnnnnnnnnnnnnnnnnnnnnnnnnnnnnnnnnnnnnnnnnnnnnnnnnnnnnnnnnnnnnnnnnnnnnnnnnnnnnnnnnnnnnnnnnnnnnnnnnnnnnnnnnnnnnnnnnnnnnnnnnnnnnnnnnnnnnnnnnnnnnnnnnnnnnnnnnnnnnnnnnnnnnnnnnnnnnnnnnnnnnnnnnnnnnnnnnnnnnnnnnnnnnnnnnnnnnnnnnnnnnnnnnnnnnnnnnnnnnnnnnnnnnnnnnnnnnnnnnnnnnnnnnnnnnnnnnnnnnnnnnnnnnnnnnnnnnnnnnnnnnnnnnnnnnnnnnnnnnnnnnnnnnnnnnnnnnnnnnnnnnnnnnnnnnnnnnnnnnnnnnnnnnnnnnnnnnnnnnnnnnnnnnnnnnnnnnnnnnnnnnnnnnnnnnnnnnnnnnnnnnnnnnnnnnnnnnnnnnnnnnnnnnnnnnnnnnnnnnnnnnnnnnnnnnnnnnnnnnnnnnnnnnnnnnnnnnnnnnnnnnnnnnnnnnnnnnnnnnnnnnnnnnnnnnnnnnnnnnnnnnnnnnnnnnnnnnnnnnnnnnnnnnnnnnnnnnnnnnnnnnnnnnnnnnnnnnnnnnnnnnnnnnnnnnnnnnnnnnnnnnnnnnnnnnnnnnnnnnnnnnnnnnnnnnnnnnnnnnnnnnnnnnnnnnnnnnnnnnnnnnnnnnnnnnnnnnnnnnnnnnnnnnnnnnnnnnnnnnnnnnnnnnnnnnnnnnnnnnnnnnnnnnnnnnnnnnnnnnnnnnnnnnnnnnnnnnnnnnnnnnnnnnnnnnnnnnnnnnnnnnnnnnnnnnnnnnnnnnnnnnnnnnnnnnnnnnnnnnnnnnnnnnnnnnnnnnnnnnnnnnnnnnnnnnnnnnnnnnnnnnnnnnnnnnnnnnnnnnnnnnnnnnnnnnnnnnnnnnnnnnnnnnnnnnnnnnnnnnnnnnnnnnnnnnnnnnnnnnnnnnnnnnnnnnnnnnnnnnnnnnnnnnnnnnnnnnnnnnnnnnnnnnnnnnnnnnnnnnnnnnnnnnnnnnnnnnnnnnnnnnnnnnnnnnnnnnnnnnnnnnnnnnnnnnnnnnnnnnnnnnnnnnnnnnnnnnnnnnnnnnnnnnnnnnnnnnnnnnnnnnnnnnnnnnnnnnnnnnnnnnnnnnnnnnnnnnnnnnnnnnnnnnnnnnnnnnnnnnnnnnnnnnnnnnnnnnnnnnnnnnnnnnnnnnnnnnnnnnnnnnnnnnnnnnnnnnnnnnnnnnnnnnnnnnnnnnnnnnnnnnnnnnnnnnnnnnnnnnnnnnnnnnnnnnnnnnnnnnnnnnnnnnnnnnnnnnnnnnnnnnnnnnnnnnnnnnnnnnnnnnnnnnnnnnnnnnnnnnnnnnnnnnnnnnnnnnnnnnnnnnnnnnnnnnnnnnnnnnnnnnnnnnnnnnnnnnnnnnnnnnnnnnnnnnnnnnnnnnnnnnnnnnnnnnnnnnnnnnnnnnnnnnnnnnnnnnnnnnnnnnnnnnnnnnnnnnnnnnnnnnnnnnnnnnnnnnnnnnnnnnnnnnnnnnnnnnnnnnnnnnnnnnnnnnnnnnnnnnnnnnnnnnnnnnnnnnnnnnnnnnnnnnnnnnnnnnnnnnnnnnnnnnnnnnnnnnnnnnnnnnnnnnnnnnnnnnnnnnnnnnnnnnnnnnnnnnnnnnnnnnnnnnnnnnnnnnnnnnnnnnnnnnnnnnnnnnnnnnnnnnnnnnnnnnnnnnnnnnnnnnnnnnnnnnnnnnnnnnnnnnnnnnnnnnnnnnnnnnnnnnnnnnnnnnnnnnnnnnnnnnnnnnnnnnnnnnnnnnnnnnnnnnnnnnnnnnnnnnnnnnnnnnnnnnnnnnnnnnnnnnnnnnnnnnnnnnnnnnnnnnnnnnnnnnnnnnnnnnnnnnnnnnnnnnnnnnnnnnnnnnnnnnnnnnnnnnnnnnnnnnnnnnnnnnnnnnnnnnnnnnnnnnnnnnnnnnnnnnnnnnnnnnnnnnnnnnnnnnnnnnnnnnnnnnnnnnnnnnnnnnnnnnnnnnnnnnnnnnnnnnnnnnnnnnnnnnnnnnnnnnnnnnnnnnnnnnnnnnnnnnnnnnnnnnnnnnnnnnnnnnnnnnnnnnnnnnnnnnnnnnnnnnnnnnnnnnnnnnnnnnnnnnnnnnnnnnnnnnnnnnnnnnnnnnnnnnnnnnnnnnnnnnnnnnnnnnnnnnnnnnnnnnnnnnnnnnnnnnnnnnnnnnnnnnnnnnnnnnnnnnnnnnnnnnnnnnnnnnnnnnnnnnnnnnnnnnnnnnnnnnnnnnnnnnnnnnnnnnnnnnnnnnnnnnnnnnnnnnnnnnnnnnnnnnnnnnnnnnnnnnnnnnnnnnnnnnnnnnnnnnnnnnnnnnnnnnnnnnnnnnnnnnnnnnnnnnnnnnnnnnnnnnnnnnnnnnnnnnnnnnnnnnnnnnnnnnnnnnnnnnnnnnnnnnnnnnnnnnnnnnnnnnnnnnnnnnnnnnnnnnnnnnnnnnnnnnnnnnnnnnnnnnnnnnnnnnnnnnnnnnnnnnnnnnnnnnnnnnnnnnnnnnnnnnnnnnnnnnnnnnnnnnnnnnnnnnnnnnnnnnnnnnnnnnnnnnnnnnnnnnnnnnnnnnnnnnnnnnnnnnnnnnnnnnnnnnnnnnnnnnnnnnnnnnnnnnnnnnnnnnnnnnnnnnnnnnnnnnnnnnnnnnnnnnnnnnnnnnnnnnnnnnnnnnnnnnnnnnnnnnnnnnnnnnnnnnnnnnnnnnnnnnnnnnnnnnnnnnnnnnnnnnnnnnnnnnnnnnnnnnnnnnnnnnnnnnnnnnnnnnnnnnnnnnnnnnnnnnnnnnnnnnnnnnnnnnnnnnnnnnnnnnnnnnnnnnnnnnnnnnnnnnnnnnnnnnnnnnnnnnnnnnnnnnnnnnnnnnnnnnnnnnnnnnnnnnnnnnnnnnnnnnnnnnnnnnnnnnnnnnnnnnnnnnnnnnnnnnnnnnnnnnnnnnnnnnnnnnnnnnnnnnnnnnnnnnnnnnnnnnnnnnnnnnnnnnnnnnnnnnnnnnnnnnnnnnnnnnnnnnnnnnnnnnnnnnnnnnnnnnnnnnnnnnnnnnnnnnnnnnnnnnnnnnnnnnnnnnnnnnnnnnnnnnnnnnnnnnnnnnnnnnnnnnnnnnnnnnnnnnnnnnnnnnnnnnnnnnnnnnnnnnnnnnnnnnnnnnnnnnnnnnnnnnnnnnnnnnnnnnnnnnnnnnnnnnnnnnnnnnnnnnnnnnnnnnnnnnnnnnnnnnnnnnnnnnnnnnnnnnnnnnnnnnnnnnnnnnnnnnnnnnnnnnnnnnnnnnnnnnnnnnnnnnnnnnnnnnnnnnnnnnnnnnnnnnnnnnnnnnnnnnnnnnnnnnnnnnnnnnnnnnnnnnnnnnnnnnnnnnnnnnnnnnnnnnnnnnnnnnnnnnnnnnnnnnnnnnnnnnnnnnnnnnnnnnnnnnnnnnnnnnnnnnnnnnnnnnnnnnnnnnnnnnnnnnnnnnnnnnnnnnnnnnnnnnnnnnnnnnnnnnnnnnnnnnnnnnnnnnnnnnnnnnnnnnnnnnnnnnnnnnnnnnnnnnnnnnnnnnnnnnnnnnnnnnnnnnnnnnnnnnnnnnnnnnnnnnnnnnnnnnnnnnnnnnnnnnnnnnnnnnnnnnnnnnnnnnnnnnnnnnnnnnnnnnnnnnnnnnnnnnnnnnnnnnnnnnnnnnnnnnnnnnnnnnnnnnnnnnnnnnnnnnnnnnnnnnnnnnnnnnnnnnnnnnnnnnnnnnnnnnnnnnnnnnnnnnnnnnnnnnnnnnnnnnnnnnnnnnnnnnnnnnnnnnnnnnnnnnnnnnnnnnnnnnnnnnnnnnnnnnnnnnnnnnnnnnnnnnnnnnnnnnnnnnnnnnnnnnnnnnnnnnnnnnnnnnnnnnnnnnnnnnnnnnnnnnnnnnnnnnnnnnnnnnnnnnnnnnnnnnnnnnnnnnnnnnnnnnnnnnnnnnnnnnnnnnnnnnnnnnnnnnnnnnnnnnnnnnnnnnnnnnnnnnnnnnnnnnnnnnnnnnnnnnnnnnnnnnnnnnnnnnnnnnnnnnnnnnnnnnnnnnnnnnnnnnnnnnnnnnnnnnnnnnnnnnnnnnnnnnnnnnnnnnnnnnnnnnnnnnnnnnnnnnnnnnnnnnnnnnnnnnnnnnnnnnnnnnnnnnnnnnnnnnnnnnnnnnnnnnnnnnnnnnnnnnnnnnnnnnnnnnnnnnnnnnnnnnnnnnnnnnnnnnnnnnnnnnnnnnnnnnnnnnnnnnnnnnnnnnnnnnnnnnnnnnnnnnnnnnnnnnnnnnnnnnnnnnnnnnnnnnnnnnnnnnnnnnnnnnnnnnnnnnnnnnnnnnnnnnnnnnnnnnnnnnnnnnnnnnnnnnnnnnnnnnnnnnnnnnnnnnnnnnnnnnnnnnnnnnnnnnnnnnnnnnnnnnnnnnnnnnnnnnnnnnnnnnnnnnnnnnnnnnnnnnnnnnnnnnnnnnnnnnnnnnnnnnnnnnnnnnnnnnnnnnnnnnnnnnnnnnnnnnnnnnnnnnnnnnnnnnnnnnnnnnnnnnnnnnnnnnnnnnnnnnnnnnnnnnnnnnnnnnnnnnnnnnnnnnnnnnnnnnnnnnnnnnnnnnnnnnnnnnnnnnnnnnnnnnnnnnnnnnnnnnnnnnnnnnnnnnnnnnnnnnnnnnnnnnnnnnnnnnnnnnnnnnnnnnnnnnnnnnnnnnnnnnnnnnnnnnnnnnnnnnnnnnnnnnnnnnnnnnnnnnnnnnnnnnnnnnnnnnnnnnnnnnnnnnnnnnnnnnnnnnnnnnnnnnnnnnnnnnnnnnnnnnnnnnnnnnnnnnnnnnnnnnnnnnnnnnnnnnnnnnnnnnnnnnnnnnnnnnnnnnnnnnnnnnnnnnnnnnnnnnnnnnnnnnnnnnnnnnnnnnnnnnnnnnnnnnnnnnnnnnnnnnnnnnnnnnnnnnnnnnnnnnnnnnnnnnnnnnnnnnnnnnnnnnnnnnnnnnnnnnnnnnnnnnnnnnnnnnnnnnnnnnnnnnnnnnnnnnnnnnnnnnnnnnnnnnnnnnnnnnnnnnnnnnnnnnnnnnnnnnnnnnnnnnnnnnnnnnnnnnnnnnnnnnnnnnnnnnnnnnnnnnnnnnnnnnnnnnnnnnnnnnnnnnnnnnnnnnnnnnnnnnnnnnnnnnnnnnnnnnnnnnnnnnnnnnnnnnnnnnnnnnnnnnnnnnnnnnnnnnnnnnnnnnnnnnnnnnnnnnnnnnnnnnnnnnnnnnnnnnnnnnnnnnnnnnnnnnnnnnnnnnnnnnnnnnnnnnnnnnnnnnnnnnnnnnnnnnnnnnnnnnnnnnnnnnnnnnnnnnnnnnnnnnnnnnnnnnnnnnnnnnnnnnnnnnnnnnnnnnnnnnnnnnnnnnnnnnnnnnnnnnnnnnnnnnnnnnnnnnnnnnnnnnnnnnnnnnnnnnnnnnnnnnnnnnnnnnnnnnnnnnnnnnnnnnnnnnnnnnnnnnnnnnnnnnnnnnnnnnnnnnnnnnnnnnnnnnnnnnnnnnnnnnnnnnnnnnnnnnnnnnnnnnnnnnnnnnnnnnnnnnnnnnnnnnnnnnnnnnnnnnnnnnnnnnnnnnnnnnnnnnnnnnnnnnnnnnnnnnnnnnnnnnnnnnnnnnnnnnnnnnnnnnnnnnnnnnnnnnnnnnnnnnnnnnnnnnnnnnnnnnnnnnnnnnnnnnnnnnnnnnnnnnnnnnnnnnnnnnnnnnnnnnnnnnnnnnnnnnnnnnnnnnnnnnnnnnnnnnnnnnnnnnnnnnnnnnnnnnnnnnnnnnnnnnnnnnnnnnnnnnnnnnnnnnnnnnnnnnnnnnnnnnnnnnnnnnnnnnnnnnnnnnnnnnnnnnnnnnnnnnnnnnnnnnnnnnnnnnnnnnnnnnnnnnnnnnnnnnnnnnnnnnnnnnnnnnnnnnnnnnnnnnnnnnnnnnnnnnnnnnnnnnnnnnnnnnnnnnnnnnnnnnnnnnnnnnnnnnnnnnnnnnnnnnnnnnnnnnnnnnnnnnnnnnnnnnnnnnnnnnnnnnnnnnnnnnnnnnnnnnnnnnnnnnnnnnnnnnnnnnnnnnnnnnnnnnnnnnnnnnnnnnnnnnnnnnnnnnnnnnnnnnnnnnnnnnnnnnnnnnnnnnnnnnnnnnnnnnnnnnnnnnnnnnnnnnnnnnnnnnnnnnnnnnnnnnnnnnnnnnnnnnnnnnnnnnnnnnnnnnnnnnnnnnnnnnnnnnnnnnnnnnnnnnnnnnnnnnnnnnnnnnnnnnnnnnnnnnnnnnnnnnnnnnnnnnnnnnnnnnnnnnnnnnnnnnnnnnnnnnnnnnnnnnnnnnnnnnnnnnnnnnnnnnnnnnnnnnnnnnnnnnnnnnnnnnnnnnnnnnnnnnnnnnnnnnnnnnnnnnnnnnnnnnnnnnnnnnnnnnnnnnnnnnnnnnnnnnnnnnnnnnnnnnnnnnnnnnnnnnnnnnnnnnnnnnnnnnnnnnnnnnnnnnnnnnnnnnnnnnnnnnnnnnnnnnnnnnnnnnnnnnnnnnnnnnnnnnnnnnnnnnnnnnnnnnnnnnnnnnnnnnnnnnnnnnnnnnnnnnnnnnnnnnnnnnnnnnnnnnnnnnnnnnnnnnnnnnnnnnnnnnnnnnnnnnnnnnnnnnnnnnnnnnnnnnnnnnnnnnnnnnnnnnnnnnnnnnnnnnnnnnnnnnnnnnnnnnnnnnnnnnnnnnnnnnnnnnnnnnnnnnnnnnnnnnnnnnnnnnnnnnnnnnnnnnnnnnnnnnnnnnnnnnnnnnnnnnnnnnnnnnnnnnnnnnnnnnnnnnnnnnnnnnnnnnnnnnnnnnnnnnnnnnnnnnnnnnnnnnnnnnnnnnnnnnnnnnnnnnnnnnnnnnnnnnnnnnnnnnnnnnnnnnnnnnnnnnnnnnnnnnnnnnnnnnnnnnnnnnnnnnnnnnnnnnnnnnnnnnnnnnnnnnnnnnnnnnnnnnnnnnnnnnnnnnnnnnnnnnnnnnnnnnnnnnnnnnnnnnnnnnnnnnnnnnnnnnnnnnnnnnnnnnnnnnnnnnnnnnnnnnnnnnnnnnnnnnnnnnnnnnnnnnnnnnnnnnnnnnnnnnnnnnnnnnnnnnnnnnnnnnnnnnnnnnnnnnnnnnnnnnnnnnnnnnnnnnnnnnnnnnnnnnnnnnnnnnnnnnnnnnnnnnnnnnnnnnnnnnnnnnnnnnnnnnnnnnnnnnnnnnnnnnnnnnnnnnnnnnnnnnnnnnnnnnnnnnnnnnnnnnnnnnnnnnnnnnnnnnnnnnnnnnnnnnnnnnnnnnnnnnnnnnnnnnnnnnnnnnnnnnnnnnnnnnnnnnnnnnnnnnnnnnnnnnnnnnnnnnnnnnnnnnnnnnnnnnnnnnnnnnnnnnnnnnnnnnnnnnnnnnnnnnnnnnnnnnnnnnnnnnnnnnnnnnnnnnnnnnnnnnnnnnnnnnnnnnnnnnnnnnnnnnnnnnnnnnnnnnnnnnnnnnnnnnnnnnnnnnnnnnnnnnnnnnnnnnnnnnnnnnnnnnnnnnnnnnnnnnnnnnnnnnnnnnnnnnnnnnnnnnnnnnnnnnnnnnnnnnnnnnnnnnnnnnnnnnnnnnnnnnnnnnnnnnnnnnnnnnnnnnnnnnnnnnnnnnnnnnnnnnnnnnnnnnnnnnnnnnnnnnnnnnnnnnnnnnnnnnnnnnnnnnnnnnnnnnnnnnnnnnnnnnnnnnnnnnnnnnnnnnnnnnnnnnnnnnnnnnnnnnnnnnnnnnnnnnnnnnnnnnnnnnnnnnnnnnnnnnnnnnnnnnnnnnnnnnnnnnnnnnnnnnnnnnnnnnnnnnnnnnnnnnnnnnnnnnnnnnnnnnnnnnnnnnnnnnnnnnnnnnnnnnnnnnnnnnnnnnnnnnnnnnnnnnnnnnnnnnnnnnnnnnnnnnnnnnnnnnnnnnnnnnnnnnnnnnnnnnnnnnnnnnnnnnnnnnnnnnnnnnnnnnnnnnnnnnnnnnnnnnnnnnnnnnnnnnnnnnnnnnnnnnnnnnnnnnnnnnnnnnnnnnnnnnnnnnnnnnnnnnnnnnnnnnnnnnnnnnnnnnnnnnnnnnnnnnnnnnnnnnnnnnnnnnnnnnnnnnnnnnnnnnnnnnnnnnnnnnnnnnnnnnnnnnnnnnnnnnnnnnnnnnnnnnnnnnnnnnnnnnnnnnnnnnnnnnnnnnnnnnnnnnnnnnnnnnnnnnnnnnnnnnnnnnnnnnnnnnnnnnnnnnnnnnnnnnnnnnnnnnnnnnnnnnnnnnnnnnnnnnnnnnnnnnnnnnnnnnnnnnnnnnnnnnnnnnnnnnnnnnnnnnnnnnnnnnnnnnnnnnnnnnnnnnnnnnnnnnnnnnnnnnnnnnnnnnnnnnnnnnnnnnnnnnnnnnnnnnnnnnnnnnnnnnnnnnnnnnnnnnnnnnnnnnnnnnnnnnnnnnnnnnnnnnnnnnnnnnnnnnnnnnnnnnnnnnnnnnnnnnnnnnnnnnnnnnnnnnnnnnnnnnnnnnnnnnnnnnnnnnnnnnnnnnnnnnnnnnnnnnnnnnnnnnnnnnnnnnnnnnnnnnnnnnnnnnnnnnnnnnnnnnnnnnnnnnnnnnnnnnnnnnnnnnnnnnnnnnnnnnnnnnnnnnnnnnnnnnnnnnnnnnnnnnnnnnnnnnnnnnnnnnnnnnnnnnnnnnnnnnnnnnnnnnnnnnnnnnnnnnnnnnnnnnnnnnnnnnnnnnnnnnnnnnnnnnnnnnnnnnnnnnnnnnnnnnnnnnnnnnnnnnnnnnnnnnnnnnnnnnnnnnnnnnnnnnnnnnnnnnnnnnnnnnnnnnnnnnnnnnnnnnnnnnnnnnnnnnnnnnnnnnnnnnnnnnnnnnnnnnnnnnnnnnnnnnnnnnnnnnnnnnnnnnnnnnnnnnnnnnnnnnnnnnnnnnnnnnnnnnnnnnnnnnnnnnnnnnnnnnnnnnnnnnnnnnnnnnnnnnnnnnnnnnnnnnnnnnnnnnnnnnnnnnnnnnnnnnnnnnnnnnnnnnnnnnnnnnnnnnnnnnnnnnnnnnnnnnnnnnnnnnnnnnnnnnnnnnnnnnnnnnnnnnnnnnnnnnnnnnnnnnnnnnnnnnnnnnnnnnnnnnnnnnnnnnnnnnnnnnnnnnnnnnnnnnnnnnnnnnnnnnnnnnnnnnnnnnnnnnnnnnnnnnnnnnnnnnnnnnnnnnnnnnnnnnnnnnnnnnnnnnnnnnnnnnnnnnnnnnnnnnnnnnnnnnnnnnnnnnnnnnnnnnnnnnnnnnnnnnnnnnnnnnnnnnnnnnnnnnnnnnnnnnnnnnnnnnnnnnnnnnnnnnnnnnnnnnnnnnnnnnnnnnnnnnnnnnnnnnnnnnnnnnnnnnnnnnnnnnnnnnnnnnnnnnnnnnnnnnnnnnnnnnnnnnnnnnnnnnnnnnnnnnnnnnnnnnnnnnnnnnnnnnnnnnnnnnnnnnnnnnnnnnnnnnnnnnnnnnnnnnnnnnnnnnnnnnnnnnnnnnnnnnnnnnnnnnnnnnnnnnnnnnnnnnnnnnnnnnnnnnnnnnnnnnnnnnnnnnnnnnnnnnnnnnnnnnnnnnnnnnnnnnnnnnnnnnnnnnnnnnnnnnnnnnnnnnnnnnnnnnnnnnnnnnnnnnnnnnnnnnnnnnnnnnnnnnnnnnnnnnnnnnnnnnnnnnnnnnnnnnnnnnnnnnnnnnnnnnnnnnnnnnnnnnnnnnnnnnnnnnnnnnnnnnnnnnnnnnnnnnnnnnnnnnnnnnnnnnnnnnnnnnnnnnnnnnnnnnnnnnnnnnnnnnnnnnnnnnnnnnnnnnnnnnnnnnnnnnnnnnnnnnnnnnnnnnnnnnnnnnnnnnnnnnnnnnnnnnnnnnnnnnnnnnnnnnnnnnnnnnnnnnnnnnnnnnnnnnnnnnnnnnnnnnnnnnnnnnnnnnnnnnnnnnnnnnnnnnnnnnnnnnnnnnnnnnnnnnnnnnnnnnnnnnnnnnnnnnnnnnnnnnnnnnnnnnnnnnnnnnnnnnnnnnnnnnnnnnnnnnnnnnnnnnnnnnnnnnnnnnnnnnnnnnnnnnnnnnnnnnnnnnnnnnnnnnnnnnnnnnnnnnnnnnnnnnnnnnnnnnnnnnnnnnnnnnnnnnnnnnnnnnnnnnnnnnnnnnnnnnnnnnnnnnnnnnnnnnnnnnnnnnnnnnnnnnnnnnnnnnnnnnnnnnnnnnnnnnnnnnnnnnnnnnnnnnnnnnnnnnnnnnnnnnnnnnnnnnnnnnnnnnnnnnnnnnnnnnnnnnnnnnnnnnnnnnnnnnnnnnnnnnnnnnnnnnnnnnnnnnnnnnnnnnnnnnnnnnnnnnnnnnnnnnnnnnnnnnnnnnnnnnnnnnnnnnnnnnnnnnnnnnnnnnnnnnnnnnnnnnnnnnnnnnnnnnnnnnnnnnnnnnnnnnnnnnnnnnnnnnnnnnnnnnnnnnnnnnnnnnnnnnnnnnnnnnnnnnnnnnnnnnnnnnnnnnnnnnnnnnnnnnnnnnnnnnnnnnnnnnnnnnnnnnnnnnnnnnnnnnnnnnnnnnnnnnnnnnnnnnnnnnnnnnnnnnnnnnnnnnnnnnnnnnnnnnnnnnnnnnnnnnnnnnnnnnnnnnnnnnnnnnnnnnnnnnnnnnnnnnnnnnnnnnnnnnnnnnnnnnnnnnnnnnnnnnnnnnnnnnnnnnnnnnnnnnnnnnnnnnnnnnnnnnnnnnnnnnnnnnnnnnnnnnnnnnnnnnnnnnnnnnnnnnnnnnnnnnnnnnnnnnnnnnnnnnnnnnnnnnnnnnnnnnnnnnnnnnnnnnnnnnnnnnnnnnnnnnnnnnnnnnnnnnnnnnnnnnnnnnnnnnnnnnnnnnnnnnnnnnnnnnnnnnnnnnnnnnnnnnnnnnnnnnnnnnnnnnnnnnnnnnnnnnnnnnnnnnnnnnnnnnnnnnnnnnnnnnnnnnnnnnnnnnnnnnnnnnnnnnnnnnnnnnnnnnnnnnnnnnnnnnnnnnnnnnnnnnnnnnnnnnnnnnnnnnnnnnnnnnnnnnnnnnnnnnnnnnnnnnnnnnnnnnnnnnnnnnnnnnnnnnnnnnnnnnnnnnnnnnnnnnnnnnnnnnnnnnnnnnnnnnnnnnnnnnnnnnnnnnnnnnnnnnnnnnnnnnnnnnnnnnnnnnnnnnnnnnnnnnnnnnnnnnnnnnnnnnnnnnnnnnnnnnnnnnnnnnnnnnnnnnnnnnnnnnnnnnnnnnnnnnnnnnnnnnnnnnnnnnnnnnnnnnnnnnnnnnnnnnnnnnnnnnnnnnnnnnnnnnnnnnnnnnnnnnnnnnnnnnnnnnnnnnnnnnnnnnnnnnnnnnnnnnnnnnnnnnnnnnnnnnnnnnnnnnnnnnnnnnnnnnnnnnnnnnnnnnnnnnnnnnnnnnnnnnnnnnnnnnnnnnnnnnnnnnnnnnnnnnnnnnnnnnnnnnnnnnnnnnnnnnnnnnnnnnnnnnnnnnnnnnnnnnnnnnnnnnnnnnnnnnnnnnnnnnnnnnnnnnnnnnnnnnnnnnnnnnnnnnnnnnnnnnnnnnnnnnnnnnnnnnnnnnnnnnnnnnnnnnnnnnnnnnnnnnnnnnnnnnnnnnnnnnnnnnnnnnnnnnnnnnnnnnnnnnnnnnnnnnnnnnnnnnnnnnnnnnnnnnnnnnnnnnnnnnnnnnnnnnnnnnnnnnnnnnnnnnnnnnnnnnnnnnnnnnnnnnnnnnnnnnnnnnnnnnnnnnnnnnnnnnnnnnnnnnnnnnnnnnnnnnnnnnnnnnnnnnnnnnnnnnnnnnnnnnnnnnnnnnnnnnnnnnnnnnnnnnnnnnnnnnnnnnnnnnnnnnnnnnnnnnnnnnnnnnnnnnnnnnnnnnnnnnnnnnnnnnnnnnnnnnnnnnnnnnnnnnnnnnnnnnnnnnnnnnnnnnnnnnnnnnnnnnnnnnnnnnnnnnnnnnnnnnnnnnnnnnnnnnnnnnnnnnnnnnnnnnnnnnnnnnnnnnnnnnnnnnnnnnnnnnnnnnnnnnnnnnnnnnnnnnnnnnnnnnnnnnnnnnnnnnnnnnnnnnnnnnnnnnnnnnnnnnnnnnnnnnnnnnnnnnnnnnnnnnnnnnnnnnnnnnnnnnnnnnnnnnnnnnnnnnnnnnnnnnnnnnnnnnnnnnnnnnnnnnnnnnnnnnnnnnnnnnnnnnnnnnnnnnnnnnnnnnnnnnnnnnnnnnnnnnnnnnnnnnnnnnnnnnnnnnnnnnnnnnnnnnnnnnnnnnnnnnnnnnnnnnnnnnnnnnnnnnnnnnnnnnnnnnnnnnnnnnnnnnnnnnnnnnnnnnnnnnnnnnnnnnnnnnnnnnnnnnnnnnnnnnnnnnnnnnnnnnnnnnnnnnnnnnnnnnnnnnnnnnnnnnnnnnnnnnnnnnnnnnnnnnnnnnnnnnnnnnnnnnnnnnnnnnnnnnnnnnnnnnnnnnnnnnnnnnnnnnnnnnnnnnnnnnnnnnnnnnnnnnnnnnnnnnnnnnnnnnnnnnnnnnnnnnnnnnnnnnnnnnnnnnnnnnnnnnnnnnnnnnnnnnnnnnnnnnnnnnnnnnnnnnnnnnnnnnnnnnnnnnnnnnnnnnnnnnnnnnnnnnnnnnnnnnnnnnnnnnnnnnnnnnnnnnnnnnnnnnnnnnnnnnnnnnnnnnnnnnnnnnnnnnnnnnnnnnnnnnnnnnnnnnnnnnnnnnnnnnnnnnnnnnnnnnnnnnnnnnnnnnnnnnnnnnnnnnnnnnnnnnnnnnnnnnnnnnnnnnnnnnnnnnnnnnnnnnnnnnnnnnnnnnnnnnnnnnnnnnnnnnnnnnnnnnnnnnnnnnnnnnnnnnnnnnnnnnnnnnnnnnnnnnnnnnnnnnnnnnnnnnnnnnnnnnnnnnnnnnnnnnnnnnnnnnnnnnnnnnnnnnnnnnnnnnnnnnnnnnnnnnnnnnnnnnnnnnnnnnnnnnnnnnnnnnnnnnnnnnnnnnnnnnnnnnnnnnnnnnnnnnnnnnnnnnnnnnnnnnnnnnnnnnnnnnnnnnnnnnnnnnnnnnnnnnnnnnnnnnnnnnnnnnnnnnnnnnnnnnnnnnnnnnnnnnnnnnnnnnnnnnnnnnnnnnnnnnnnnnnnnnnnnnnnnnnnnnnnnnnnnnnnnnnnnnnnnnnnnnnnnnnnnnnnnnnnnnnnnnnnnnnnnnnnnnnnnnnnnnnnnnnnnnnnnnnnnnnnnnnnnnnnnnnnnnnnnnnnnnnnnnnnnnnnnnnnnnnnnnnnnnnnnnnnnnnnnnnnnnnnnnnnnnnnnnnnnnnnnnnnnnnnnnnnnnnnnnnnnnnnnnnnnnnnnnnnnnnnnnnnnnnnnnnnnnnnnnnnnnnnnnnnnnnnnnnnnnnnnnnnnnnnnnnnnnnnnnnnnnnnnnnnnnnnnnnnnnnnnnnnnnnnnnnnnnnnnnnnnnnnnnnnnnnnnnnnnnnnnnnnnnnnnnnnnnnnnnnnnnnnnnnnnnnnnnnnnnnnnnnnnnnnnnnnnnnnnnnnnnnnnnnnnnnnnnnnnnnnnnnnnnnnnnnnnnnnnnnnnnnnnnnnnnnnnnnnnnnnnnnnnnnnnnnnnnnnnnnnnnnnnnnnnnnnnnnnnnnnnnnnnnnnnnnnnnnnnnnnnnnnnnnnnnnnnnnnnnnnnnnnnnnnnnnnnnnnnnnnnnnnnnnnnnnnnnnnnnnnnnnnnnnnnnnnnnnnnnnnnnnnnnnnnnnnnnnnnnnnnnnnnnnnnnnnnnnnnnnnnnnnnnnnnnnnnnnnnnnnnnnnnnnnnnnnnnnnnnnnnnnnnnnnnnnnnnnnnnnnnnnnnnnnnnnnnnnnnnnnnnnnnnnnnnnnnnnnnnnnnnnnnnnnnnnnnnnnnnnnnnnnnnnnnnnnnnnnnnnnnnnnnnnnnnnnnnnnnnnnnnnnnnnnnnnnnnnnnnnnnnnnnnnnnnnnnnnnnnnnnnnnnnnnnnnnnnnnnnnnnnnnnnnnnnnnnnnnnnnnnnnnnnnnnnnnnnnnnnnnnnnnnnnnnnnnnnnnnnnnnnnnnnnnnnnnnnnnnnnnnnnnnnnnnnnnnnnnnnnnnnnnnnnnnnnnnnnnnnnnnnnnnnnnnnnnnnnnnnnnnnnnnnnnnnnnnnnnnnnnnnnnnnnnnnnnnnnnnnnnnnnnnnnnnnnnnnnnnnnnnnnnnnnnnnnnnnnnnnnnnnnnnnnnnnnnnnnnnnnnnnnnnnnnnnnnnnnnnnnnnnnnnnnnnnnnnnnnnnnnnnnnnnnnnnnnnnnnnnnnnnnnnnnnnnnnnnnnnnnnnnnnnnnnnnnnnnnnnnnnnnnnnnnnnnnnnnnnnnnnnnnnnnnnnnnnnnnnnnnnnnnnnnnnnnnnnnnnnnnnnnnnnnnnnnnnnnnnnnnnnnnnnnnnnnnnnnnnnnnnnnnnnnnnnnnnnnnnnnnnnnnnnnnnnnnnnnnnnnnnnnnnnnnnnnnnnnnnnnnnnnnnnnnnnnnnnnnnnnnnnnnnnnnnnnnnnnnnnnnnnnnnnnnnnnnnnnnnnnnnnnnnnnnnnnnnnnnnnnnnnnnnnnnnnnnnnnnnnnnnnnnnnnnnnnnnnnnnnnnnnnnnnnnnnnnnnnnnnnnnnnnnnnnnnnnnnnnnnnnnnnnnnnnnnnnnnnnnnnnnnnnnnnnnnnnnnnnnnnnnnnnnnnnnnnnnnnnnnnnnnnnnnnnnnnnnnnnnnnnnnnnnnnnnnnnnnnnnnnnnnnnnnnnnnnnnnnnnnnnnnnnnnnnnnnnnnnnnnnnnnnnnnnnnnnnnnnnnnnnnnnnnnnnnnnnnnnnnnnnnnnnnnnnnnnnnnnnnnnnnnnnnnnnnnnnnnnnnnnnnnnnnnnnnnnnnnnnnnnnnnnnnnnnnnnnnnnnnnnnnnnnnnnnnnnnnnnnnnnnnnnnnnnnnnnnnnnnnnnnnnnnnnnnnnnnnnnnnnnnnnnnnnnnnnnnnnnnnnnnnnnnnnnnnnnnnnnnnnnnnnnnnnnnnnnnnnnnnnnnnnnnnnnnnnnnnnnnnnnnnnnnnnnnnnnnnnnnnnnnnnnnnnnnnnnnnnnnnnnnnnnnnnnnnnnnnnnnnnnnnnnnnnnnnnnnnnnnnnnnnnnnnnnnnnnnnnnnnnnnnnnnnnnnnnnnnnnnnnnnnnnnnnnnnnnnnnnnnnnnnnnnnnnnnnnnnnnnnnnnnnnnnnnnnnnnnnnnnnnnnnnnnnnnnnnnnnnnnnnnnnnnnnnnnnnnnnnnnnnnnnnnnnnnnnnnnnnnnnnnnnnnnnnnnnnnnnnnnnnnnnnnnnnnnnnnnnnnnnnnnnnnnnnnnnnnnnnnnnnnnnnnnnnnnnnnnnnnnnnnnnnnnnnnnnnnnnnnnnnnnnnnnnnnnnnnnnnnnnnnnnnnnnnnnnnnnnnnnnnnnnnnnnnnnnnnnnnnnnnnnnnnnnnnnnnnnnnnnnnnnnnnnnnnnnnnnnnnnnnnnnnnnnnnnnnnnnnnnnnnnnnnnnnnnnnnnnnnnnnnnnnnnnnnnnnnnnnnnnnnnnnnnnnnnnnnnnnnnnnnnnnnnnnnnnnnnnnnnnnnnnnnnnnnnnnnnnnnnnnnnnnnnnnnnnnnnnnnnnnnnnnnnnnnnnnnnnnnnnnnnnnnnnnnnnnnnnnnnnnnnnnnnnnnnnnnnnnnnnnnnnnnnnnnnnnnnnnnnnnnnnnnnnnnnnnnnnnnnnnnnnnnnnnnnnnnnnnnnnnnnnnnnnnnnnnnnnnnnnnnnnnnnnnnnnnnnnnnnnnnnnnnnnnnnnnnnnnnnnnnnnnnnnnnnnnnnnnnnnnnnnnnnnnnnnnnnnnnnnnnnnnnnnnnnnnnnnnnnnnnnnnnnnnnnnnnnnnnnnnnnnnnnnnnnnnnnnnnnnnnnnnnnnnnnnnnnnnnnnnnnnnnnnnnnnnnnnnnnnnnnnnnnnnnnnnnnnnnnnnnnnnnnnnnnnnnnnnnnnnnnnnnnnnnnnnnnnnnnnnnnnnnnnnnnnnnnnnnnnnnnnnnnnnnnnnnnnnnnnnnnnnnnnnnnnnnnnnnnnnnnnnnnnnnnnnnnnnnnnnnnnnnnnnnnnnnnnnnnnnnnnnnnnnnnnnnnnnnnnnnnnnnnnnnnnnnnnnnnnnnnnnnnnnnnnnnnnnnnnnnnnnnnnnnnnnnnnnnnnnnnnnnnnnnnnnnnnnnnnnnnnnnnnnnnnnnnnnnnnnnnnnnnnnnnnnnnnnnnnnnnnnnnnnnnnnnnnnnnnnnnnnnnnnnnnnnnnnnnnnnnnnnnnnnnnnnnnnnnnnnnnnnnnnnnnnnnnnnnnnnnnnnnnnnnnnnnnnnnnnnnnnnnnnnnnnnnnnnnnnnnnnnnnnnnnnnnnnnnnnnnnnnnnnnnnnnnnnnnnnnnnnnnnnnnnnnnnnnnnnnnnnnnnnnnnnnnnnnnnnnnnnnnnnnnnnnnnnnnnnnnnnnnnnnnnnnnnnnnnnnnnnnnnnnnnnnnnnnnnnnnnnnnnnnnnnnnnnnnnnnnnnnnnnnnnnnnnnnnnnnnnnnnnnnnnnnnnnnnnnnnnnnnnnnnnnnnnnnnnnnnnnnnnnnnnnnnnnnnnnnnnnnnnnnnnnnnnnnnnnnnnnnnnnnnnnnnnnnnnnnnnnnnnnnnnnnnnnnnnnnnnnnnnnnnnnnnnnnnnnnnnnnnnnnnnnnnnnnnnnnnnnnnnnnnnnnnnnnnnnnnnnnnnnnnnnnnnnnnnnnnnnnnnnnnnnnnnnnnnnnnnnnnnnnnnnnnnnnnnnnnnnnnnnnnnnnnnnnnnnnnnnnnnnnnnnnnnnnnnnnnnnnnnnnnnnnnnnnnnnnnnnnnnnnnnnnnnnnnnnnnnnnnnnnnnnnnnnnnnnnnnnnnnnnnnnnnnnnnnnnnnnnnnnnnnnnnnnnnnnnnnnnnnnnnnnnnnnnnnnnnnnnnnnnnnnnnnnnnnnnnnnnnnnnnnnnnnnnnnnnnnnnnnnnnnnnnnnnnnnnnnnnnnnnnnnnnnnnnnnnnnnnnnnnnnnnnnnnnnnnnnnnnnnnnnnnnnnnnnnnnnnnnnnnnnnnnnnnnnnnnnnnnnnnnnnnnnnnnnnnnnnnnnnnnnnnnnnnnnnnnnnnnnnnnnnnnnnnnnnnnnnnnnnnnnnnnnnnnnnnnnnnnnnnnnnnnnnnnnnnnnnnnnnnnnnnnnnnnnnnnnnnnnnnnnnnnnnnnnnnnnnnnnnnnnnnnnnnnnnnnnnnnnnnnnnnnnnnnnnnnnnnnnnnnnnnnnnnnnnnnnnnnnnnnnnnnnnnnnnnnnnnnnnnnnnnnnnnnnnnnnnnnnnnnnnnnnnnnnnnnnnnnnnnnnnnnnnnnnnnnnnnnnnnnnnnnnnnnnnnnnnnnnnnnnnnnnnnnnnnnnnnnnnnnnnnnnnnnnnnnnnnnnnnnnnnnnnnnnnnnnnnnnnnnnnnnnnnnnnnnnnnnnnnnnnnnnnnnnnnnnnnnnnnnnnnnnnnnnnnnnnnnnnnnnnnnnnnnnnnnnnnnnnnnnnnnnnnnnnnnnnnnnnnnnnnnnnnnnnnnnnnnnnnnnnnnnnnnnnnnnnnnnnnnnnnnnnnnnnnnnnnnnnnnnnnnnnnnnnnnnnnnnnnnnnnnnnnnnnnnnnnnnnnnnnnnnnnnnnnnnnnnnnnnnnnnnnnnnnnnnnnnnnnnnnnnnnnnnnnnnnnnnnnnnnnnnnnnnnnnnnnnnnnnnnnnnnnnnnnnnnnnnnnnnnnnnnnnnnnnnnnnnnnnnnnnnnnnnnnnnnnnnnnnnnnnnnnnnnnnnnnnnnnnnnnnnnnnnnnnnnnnnnnnnnnnnnnnnnnnnnnnnnnnnnnnnnnnnnnnnnnnnnnnnnnnnnnnnnnnnnnnnnnnnnnnnnnnnnnnnnnnnnnnnnnnnnnnnnnnnnnnnnnnnnnnnnnnnnnnnnnnnnnnnnnnnnnnnnnnnnnnnnnnnnnnnnnnnnnnnnnnnnnnnnnnnnnnnnnnnnnnnnnnnnnnnnnnnnnnnnnnnnnnnnnnnnnnnnnnnnnnnnnnnnnnnnnnnnnnnnnnnnnnnnnnnnnnnnnnnnnnnnnnnnnnnnnnnnnnnnnnnnnnnnnnnnnnnnnnnnnnnnnnnnnnnnnnnnnnnnnnnnnnnnnnnnnnnnnnnnnnnnnnnnnnnnnnnnnnnnnnnnnnnnnnnnnnnnnnnnnnnnnnnnnnnnnnnnnnnnnnnnnnnnnnnnnnnnnnnnnnnnnnnnnnnnnnnnnnnnnnnnnnnnnnnnnnnnnnnnnnnnnnnnnnnnnnnnnnnnnnnnnnnnnnnnnnnnnnnnnnnnnnnnnnnnnnnnnnnnnnnnnnnnnnnnnnnnnnnnnnnnnnnnnnnnnnnnnnnnnnnnnnnnnnnnnnnnnnnnnnnnnnnnnnnnnnnnnnnnnnnnnnnnnnnnnnnnnnnnnnnnnnnnnnnnnnnnnnnnnnnnnnnnnnnnnnnnnnnnnnnnnnnnnnnnnnnnnnnnnnnnnnnnnnnnnnnnnnnnnnnnnnnnnnnnnnnnnnnnnnnnnnnnnnnnnnnnnnnnnnnnnnnnnnnnnnnnnnnnnnnnnnnnnnnnnnnnnnnnnnnnnnnnnnnnnnnnnnnnnnnnnnnnnnnnnnnnnnnnnnnnnnnnnnnnnnnnnnnnnnnnnnnnnnnnnnnnnnnnnnnnnnnnnnnnnnnnnnnnnnnnnnnnnnnnnnnnnnnnnnnnnnnnnnnnnnnnnnnnnnnnnnnnnnnnnnnnnnnnnnnnnnnnnnnnnnnnnnnnnnnnnnnnnnnnnnnnnnnnnnnnnnnnnnnnnnnnnnnnnnnnnnnnnnnnnnnnnnnnnnnnnnnnnnnnnnnnnnnnnnnnnnnnnnnnnnnnnnnnnnnnnnnnnnnnnnnnnnnnnnnnnnnnnnnnnnnnnnnnnnnnnnnnnnnnnnnnnnnnnnnnnnnnnnnnnnnnnnnnnnnnnnnnnnnnnnnnnnnnnnnnnnnnnnnnnnnnnnnnnnnnnnnnnnnnnnnnnnnnnnnnnnnnnnnnnnnnnnnnnnnnnnnnnnnnnnnnnnnnnnnnnnnnnnnnnnnnnnnnnnnnnnnnnnnnnnnnnnnnnnnnnnnnnnnnnnnnnnnnnnnnnnnnnnnnnnnnnnnnnnnnnnnnnnnnnnnnnnnnnnnnnnnnnnnnnnnnnnnnnnnnnnnnnnnnnnnnnnnnnnnnnnnnnnnnnnnnnnnnnnnnnnnnnnnnnnnnnnnnnnnnnnnnnnnnnnnnnnnnnnnnnnnnnnnnnnnnnnnnnnnnnnnnnnnnnnnnnnnnnnnnnnnnnnnnnnnnnnnnnnnnnnnnnnnnnnnnnnnnnnnnnnnnnnnnnnnnnnnnnnnnnnnnnnnnnnnnnnnnnnnnnnnnnnnnnnnnnnnnnnnnnnnnnnnnnnnnnnnnnnnnnnnnnnnnnnnnnnnnnnnnnnnnnnnnnnnnnnnnnnnnnnnnnnnnnnnnnnnnnnnnnnnnnnnnnnnnnnnnnnnnnnnnnnnnnnnnnnnnnnnnnnnnnnnnnnnnnnnnnnnnnnnnnnnnnnnnnnnnnnnnnnnnnnnnnnnnnnnnnnnnnnnnnnnnnnnnnnnnnnnnnnnnnnnnnnnnnnnnnnnnnnnnnnnnnnnnnnnnnnnnnnnnnnnnnnnnnnnnnnnnnnnnnnnnnnnnnnnnnnnnnnnnnnnnnnnnnnnnnnnnnnnnnnnnnnnnnnnnnnnnnnnnnnnnnnnnnnnnnnnnnnnnnnnnnnnnnnnnnnnnnnnnnnnnnnnnnnnnnnnnnnnnnnnnnnnnnnnnnnnnnnnnnnnnnnnnnnnnnnnnnnnnnnnnnnnnnnnnnnnnnnnnnnnnnnnnnnnnnnnnnnnnnnnnnnnnnnnnnnnnnnnnnnnnnnnnnnnnnnnnnnnnnnnnnnnnnnnnnnnnnnnnnnnnnnnnnnnnnnnnnnnnnnnnnnnnnnnnnnnnnnnnnnnnnnnnnnnnnnnnnnnnnnnnnnnnnnnnnnnnnnnnnnnnnnnnnnnnnnnnnnnnnnnnnnnnnnnnnnnnnnnnnnnnnnnnnnnnnnnnnnnnnnnnnnnnnnnnnnnnnnnnnnnnnnnnnnnnnnnnnnnnnnnnnnnnnnnnnnnnnnnnnnnnnnnnnnnnnnnnnnnnnnnnnnnnnnnnnnnnnnnnnnnnnnnnnnnnnnnnnnnnnnnnnnnnnnnnnnnnnnnnnnnnnnnnnnnnnnnnnnnnnnnnnnnnnnnnnnnnnnnnnnnnnnnnnnnnnnnnnnnnnnnnnnnnnnnnnnnnnnnnnnnnnnnnnnnnnnnnnnnnnnnnnnnnnnnnnnnnnnnnnnnnnnnnnnnnnnnnnnnnnnnnnnnnnnnnnnnnnnnnnnnnnnnnnnnnnnnnnnnnnnnnnnnnnnnnnnnnnnnnnnnnnnnnnnnnnnnnnnnnnnnnnnnnnnnnnnnnnnnnnnnnnnnnnnnnnnnnnnnnnnnnnnnnnnnnnnnnnnnnnnnnnnnnnnnnnnnnnnnnnnnnnnnnnnnnnnnnnnnnnnnnnnnnnnnnnnnnnnnnnnnnnnnnnnnnnnnnnnnnnnnnnnnnnnnnnnnnnnnnnnnnnnnnnnnnnnnnnnnnnnnnnnnnnnnnnnnnnnnnnnnnnnnnnnnnnnnnnnnnnnnnnnnnnnnnnnnnnnnnnnnnnnnnnnnnnnnnnnnnnnnnnnnnnnnnnnnnnnnnnnnnnnnnnnnnnnnnnnnnnnnnnnnnnnnnnnnnnnnnnnnnnnnnnnnnnnnnnnnnnnnnnnnnnnnnnnnnnnnnnnnnnnnnnnnnnnnnnnnnnnnnnnnnnnnnnnnnnnnnnnnnnnnnnnnnnnnnnnnnnnnnnnnnnnnnnnnnnnnnnnnnnnnnnnnnnnnnnnnnnnnnnnnnnnnnnnnnnnnnnnnnnnnnnnnnnnnnnnnnnnnnnnnnnnnnnnnnnnnnnnnnnnnnnnnnnnnnnnnnnnnnnnnnnnnnnnnnnnnnnnnnnnnnnnnnnnnnnnnnnnnnnnnnnnnnnnnnnnnnnnnnnnnnnnnnnnnnnnnnnnnnnnnnnnnnnnnnnnnnnnnnnnnnnnnnnnnnnnnnnnnnnnnnnnnnnnnnnnnnnnnnnnnnnnnnnnnnnnnnnnnnnnnnnnnnnnnnnnnnnnnnnnnnnnnnnnnnnnnnnnnnnnnnnnnnnnnnnnnnnnnnnnnnnnnnnnnnnnnnnnnnnnnnnnnnnnnnnnnnnnnnnnnnnnnnnnnnnnnnnnnnnnnnnnnnnnnnnnnnnnnnnnnnnnnnnnnnnnnnnnnnnnnnnnnnnnnnnnnnnnnnnnnnnnnnnnnnnnnnnnnnnnnnnnnnnnnnnnnnnnnnnnnnnnnnnnnnnnnnnnnnnnnnnnnnnnnnnnnnnnnnnnnnnnnnnnnnnnnnnnnnnnnnnnnnnnnnnnnnnnnnnnnnnnnnnnnnnnnnnnnnnnnnnnnnnnnnnnnnnnnnnnnnnnnnnnnnnnnnnnnnnnnnnnnnnnnnnnnnnnnnnnnnnnnnnnnnnnnnnnnnnnnnnnnnnnnnnnnnnnnnnnnnnnnnnnnnnnnnnnnnnnnnnnnnnnnnnnnnnnnnnnnnnnnnnnnnnnnnnnnnnnnnnnnnnnnnnnnnnnnnnnnnnnnnnnnnnnnnnnnnnnnnnnnnnnnnnnnnnnnnnnnnnnnnnnnnnnnnnnnnnnnnnnnnnnnnnnnnnnnnnnnnnnnnnnnnnnnnnnnnnnnnnnnnnnnnnnnnnnnnnnnnnnnnnnnnnnnnnnnnnnnnnnnnnnnnnnnnnnnnnnnnnnnnnnnnnnnnnnnnnnnnnnnnnnnnnnnnnnnnnnnnnnnnnnnnnnnnnnnnnnnnnnnnnnnnnnnnnnnnnnnnnnnnnnnnnnnnnnnnnnnnnnnnnnnnnnnnnnnnnnnnnnnnnnnnnnnnnnnnnnnnnnnnnnnnnnnnnnnnnnnnnnnnnnnnnnnnnnnnnnnnnnnnnnnnnnnnnnnnnnnnnnnnnnnnnnnnnnnnnnnnnnnnnnnnnnnnnnnnnnnnnnnnnnnnnnnnnnnnnnnnnnnnnnnnnnnnnnnnnnnnnnnnnnnnnnnnnnnnnnnnnnnnnnnnnnnnnnnnnnnnnnnnnnnnnnnnnnnnnnnnnnnnnnnnnnnnnnnnnnnnnnnnnnnnnnnnnnnnnnnnnnnnnnnnnnnnnnnnnnnnnnnnnnnnnnnnnnnnnnnnnnnnnnnnnnnnnnnnnnnnnnnnnnnnnnnnnnnnnnnnnnnnnnnnnnnnnnnnnnnnnnnnnnnnnnnnnnnnnnnnnnnnnnnnnnnnnnnnnnnnnnnnnnnnnnnnnnnnnnnnnnnnnnnnnnnnnnnnnnnnnnnnnnnnnnnnnnnnnnnnnnnnnnnnnnnnnnnnnnnnnnnnnnnnnnnnnnnnnnnnnnnnnnnnnnnnnnnnnnnnnnnnnnnnnnnnnnnnnnnnnnnnnnnnnnnnnnnnnnnnnnnnnnnnnnnnnnnnnnnnnnnnnnnnnnnnnnnnnnnnnnnnnnnnnnnnnnnnnnnnnnnnnnnnnnnnnnnnnnnnnnnnnnnnnnnnnnnnnnnnnnnnnnnnnnnnnnnnnnnnnnnnnnnnnnnnnnnnnnnnnnnnnnnnnnnnnnnnnnnnnnnnnnnnnnnnnnnnnnnnnnnnnnnnnnnnnnnnnnnnnnnnnnnnnnnnnnnnnnnnnnnnnnnnnnnnnnnnnnnnnnnnnnnnnnnnnnnnnnnnnnnnnnnnnnnnnnnnnnnnnnnnnnnnnnnnnnnnnnnnnnnnnnnnnnnnnnnnnnnnnnnnnnnnnnnnnnnnnnnnnnnnnnnnnnnnnnnnnnnnnnnnnnnnnnnnnnnnnnnnnnnnnnnnnnnnnnnnnnnnnnnnnnnnnnnnnnnnnnnnnnnnnnnnnnnnnnnnnnnnnnnnnnnnnnnnnnnnnnnnnnnnnnnnnnnnnnnnnnnnnnnnnnnnnnnnnnnnnnnnnnnnnnnnnnnnnnnnnnnnnnnnnnnnnnnnnnnnnnnnnnnnnnnnnnnnnnnnnnnnnnnnnnnnnnnnnnnnnnnnnnnnnnnnnnnnnnnnnnnnnnnnnnnnnnnnnnnnnnnnnnnnnnnnnnnnnnnnnnnnnnnnnnnnnnnnnnnnnnnnnnnnnnnnnnnnnnnnnnnnnnnnnnnnnnnnnnnnnnnnnnnnnnnnnnnnnnnnnnnnnnnnnnnnnnnnnnnnnnnnnnnnnnnnnnnnnnnnnnnnnnnnnnnnnnnnnnnnnnnnnnnnnnnnnnnnnnnnnnnnnnnnnnnnnnnnnnnnnnnnnnnnnnnnnnnnnnnnnnnnnnnnnnnnnnnnnnnnnnnnnnnnnnnnnnnnnnnnnnnnnnnnnnnnnnnnnnnnnnnnnnnnnnnnnnnnnnnnnnnnnnnnnnnnnnnnnnnnnnnnnnnnnnnnnnnnnnnnnnnnnnnnnnnnnnnnnnnnnnnnnnnnnnnnnnnnnnnnnnnnnnnnnnnnnnnnnnnnnnnnnnnnnnnnnnnnnnnnnnnnnnnnnnnnnnnnnnnnnnnnnnnnnnnnnnnnnnnnnnnnnnnnnnnnnnnnnnnnnnnnnnnnnnnnnnnnnnnnnnnnnnnnnnnnnnnnnnnnnnnnnnnnnnnnnnnnnnnnnnnnnnnnnnnnnnnnnnnnnnnnnnnnnnnnnnnnnnnnnnnnnnnnnnnnnnnnnnnnnnnnnnnnnnnnnnnnnnnnnnnnnnnnnnnnnnnnnnnnnnnnnnnnnnnnnnnnnnnnnnnnnnnnnnnnnnnnnnnnnnnnnnnnnnnnnnnnnnnnnnnnnnnnnnnnnnnnnnnnnnnnnnnnnnnnnnnnnnnnnnnnnnnnnnnnnnnnnnnnnnnnnnnnnnnnnnnnnnnnnnnnnnnnnnnnnnnnnnnnnnnnnnnnnnnnnnnnnnnnnnnnnnnnnnnnnnnnnnnnnnnnnnnnnnnnnnnnnnnnnnnnnnnnnnnnnnnnnnnnnnnnnnnnnnnnnnnnnnnnnnnnnnnnnnnnnnnnnnnnnnnnnnnnnnnnnnnnnnnnnnnnnnnnnnnnnnnnnnnnnnnnnnnnnnnnnnnnnnnnnnnnnnnnnnnnnnnnnnnnnnnnnnnnnnnnnnnnnnnnnnnnnnnnnnnnnnnnnnnnnnnnnnnnnnnnnnnnnnnnnnnnnnnnnnnnnnnnnnnnnnnnnnnnnnnnnnnnnnnnnnnnnnnnnnnnnnnnnnnnnnnnnnnnnnnnnnnnnnnnnnnnnnnnnnnnnnnnnnnnnnnnnnnnnnnnnnnnnnnnnnnnnnnnnnnnnnnnnnnnnnnnnnnnnnnnnnnnnnnnnnnnnnnnnnnnnnnnnnnnnnnnnnnnnnnnnnnnnnnnnnnnnnnnnnnnnnnnnnnnnnnnnnnnnnnnnnnnnnnnnnnnnnnnnnnnnnnnnnnnnnnnnnnnnnnnnnnnnnnnnnnnnnnnnnnnnnnnnnnnnnnnnnnnnnnnnnnnnnnnnnnnnnnnnnnnnnnnnnnnnnnnnnnnnnnnnnnnnnnnnnnnnnnnnnnnnnnnnnnnnnnnnnnnnnnnnnnnnnnnnnnnnnnnnnnnnnnnnnnnnnnnnnnnnnnnnnnnnnnnnnnnnnnnnnnnnnnnnnnnnnnnnnnnnnnnnnnnnnnnnnnnnnnnnnnnnnnnnnnnnnnnnnnnnnnnnnnnnnnnnnnnnnnnnnnnnnnnnnnnnnnnnnnnnnnnnnnnnnnnnnnnnnnnnnnnnnnnnnnnnnnnnnnnnnnnnnnnnnnnnnnnnnnnnnnnnnnnnnnnnnnnnnnnnnnnnnnnnnnnnnnnnnnnnnnnnnnnnnnnnnnnnnnnnnnnnnnnnnnnnnnnnnnnnnnnnnnnnnnnnnnnnnnnnnnnnnnnnnnnnnnnnnnnnnnnnnnnnnnnnnnnnnnnnnnnnnnnnnnnnnnnnnnnnnnnnnnnnnnnnnnnnnnnnnnnnnnnnnnnnnnnnnnnnnnnnnnnnnnnnnnnnnnnnnnnnnnnnnnnnnnnnnnnnnnnnnnnnnnnnnnnnnnnnnnnnnnnnnnnnnnnnnnnnnnnnnnnnnnnnnnnnnnnnnnnnnnnnnnnnnnnnnnnnnnnnnnnnnnnnnnnnnnnnnnnnnnnnnnnnnnnnnnnnnnnnnnnnnnnnnnnnnnnnnnnnnnnnnnnnnnnnnnnnnnnnnnnnnnnnnnnnnnnnnnnnnnnnnnnnnnnnnnnnnnnnnnnnnnnnnnnnnnnnnnnnnnnnnnnnnnnnnnnnnnnnnnnnnnnnnnnnnnnnnnnnnnnnnnnnnnnnnnnnnnnnnnnnnnnnnnnnnnnnnnnnnnnnnnnnnnnnnnnnnnnnnnnnnnnnnnnnnnnnnnnnnnnnnnnnnnnnnnnnnnnnnnnnnnnnnnnnnnnnnnnnnnnnnnnnnnnnnnnnnnnnnnnnnnnnnnnnnnnnnnnnnnnnnnnnnnnnnnnnnnnnnnnnnnnnnnnnnnnnnnnnnnnnnnnnnnnnnnnnnnnnnnnnnnnnnnnnnnnnnnnnnnnnnnnnnnnnnnnnnnnnnnnnnnnnnnnnnnnnnnnnnnnnnnnnnnnnnnnnnnnnnnnnnnnnnnnnnnnnnnnnnnnnnnnnnnnnnnnnnnnnnnnnnnnnnnnnnnnnnnnnnnnnnnnnnnnnnnnnnnnnnnnnnnnnnnnnnnnnnnnnnnnnnnnnnnnnnnnnnnnnnnnnnnnnnnnnnnnnnnnnnnnnnnnnnnnnnnnnnnnnnnnnnnnnnnnnnnnnnnnnnnnnnnnnnnnnnnnnnnnnnnnnnnnnnnnnnnnnnnnnnnnnnnnnnnnnnnnnnnnnnnnnnnnnnnnnnnnnnnnnnnnnnnnnnnnnnnnnnnnnnnnnnnnnnnnnnnnnnnnnnnnnnnnnnnnnnnnnnnnnnnnnnnnnnnnnnnnnnnnnnnnnnnnnnnnnnnnnnnnnnnnnnnnnnnnnnnnnnnnnnnnnnnnnnnnnnnnnnnnnnnnnnnnnnnnnnnnnnnnnnnnnnnnnnnnnnnnnnnnnnnnnnnnnnnnnnnnnnnnnnnnnnnnnnnnnnnnnnnnnnnnnnnnnnnnnnnnnnnnnnnnnnnnnnnnnnnnnnnnnnnnnnnnnnnnnnnnnnnnnnnnnnnnnnnnnnnnnnnnnnnnnnnnnnnnnnnnnnnnnnnnnnnnnnnnnnnnnnnnnnnnnnnnnnnnnnnnnnnnnnnnnnnnnnnnnnnnnnnnnnnnnnnnnnnnnnnnnnnnnnnnnnnnnnnnnnnnnnnnnnnnnnnnnnnnnnnnnnnnnnnnnnnnnnnnnnnnnnnnnnnnnnnnnnnnnnnnnnnnnnnnnnnnnnnnnnnnnnnnnnnnnnnnnnnnnnnnnnnnnnnnnnnnnnnnnnnnnnnnnnnnnnnnnnnnnnnnnnnnnnnnnnnnnnnnnnnnnnnnnnnnnnnnnnnnnnnnnnnnnnnnnnnnnnnnnnnnnnnnnnnnnnnnnnnnnnnnnnnnnnnnnnnnnnnnnnnnnnnnnnnnnnnnnnnnnnnnnnnnnnnnnnnnnnnnnnnnnnnnnnnnnnnnnnnnnnnnnnnnnnnnnnnnnnnnnnnnnnnnnnnnnnnnnnnnnnnnnnnnnnnnnnnnnnnnnnnnnnnnnnnnnnnnnnnnnnnnnnnnnnnnnnnnnnnnnnnnnnnnnnnnnnnnnnnnnnnnnnnnnnnnnnnnnnnnnnnnnnnnnnnnnnnnnnnnnnnnnnnnnnnnnnnnnnnnnnnnnnnnnnnnnnnnnnnnnnnnnnnnnnnnnnnnnnnnnnnnnnnnnnnnnnnnnnnnnnnnnnnnnnnnnnnnnnnnnnnnnnnnnnnnnnnnnnnnnnnnnnnnnnnnnnnnnnnnnnnnnnnnnnnnnnnnnnnnnnnnnnnnnnnnnnnnnnnnnnnnnnnnnnnnnnnnnnnnnnnnnnnnnnnnnnnnnnnnnnnnnnnnnnnnnnnnnnnnnnnnnnnnnnnnnnnnnnnnnnnnnnnnnnnnnnnnnnnnnnnnnnnnnnnnnnnnnnnnnnnnnnnnnnnnnnnnnnnnnnnnnnnnnnnnnnnnnnnnnnnnnnnnnnnnnnnnnnnnnnnnnnnnnnnnnnnnnnnnnnnnnnnnnnnnnnnnnnnnnnnnnnnnnnnnnnnnnnnnnnnnnnnnnnnnnnnnnnnnnnnnnnnnnnnnnnnnnnnnnnnnnnnnnnnnnnnnnnnnnnnnnnnnnnnnnnnnnnnnnnnnnnnnnnnnnnnnnnnnnnnnnnnnnnnnnnnnnnnnnnnnnnnnnnnnnnnnnnnnnnnnnnnnnnnnnnnnnnnnnnnnnnnnnnnnnnnnnnnnnnnnnnnnnnnnnnnnnnnnnnnnnnnnnnnnnnnnnnnnnnnnnnnnnnnnnnnnnnnnnnnnnnnnnnnnnnnnnnnnnnnnnnnnnnnnnnnnnnnnnnnnnnnnnnnnnnnnnnnnnnnnnnnnnnnnnnnnnnnnnnnnnnnnnnnnnnnnnnnnnnnnnnnnnnnnnnnnnnnnnnnnnnnnnnnnnnnnnnnnnnnnnnnnnnnnnnnnnnnnnnnnnnnnnnnnnnnnnnnnnnnnnnnnnnnnnnnnnnnnnnnnnnnnnnnnnnnnnnnnnnnnnnnnnnnnnnnnnnnnnnnnnnnnnnnnnnnnnnnnnnnnnnnnnnnnnnnnnnnnnnnnnnnnnnnnnnnnnnnnnnnnnnnnnnnnnnnnnnnnnnnnnnnnnnnnnnnnnnnnnnnnnnnnnnnnnnnnnnnnnnnnnnnnnnnnnnnnnnnnnnnnnnnnnnnnnnnnnnnnnnnnnnnnnnnnnnnnnnnnnnnnnnnnnnnnnnnnnnnnnnnnnnnnnnnnnnnnnnnnnnnnnnnnnnnnnnnnnnnnnnnnnnnnnnnnnnnnnnnnnnnnnnnnnnnnnnnnnnnnnnnnnnnnnnnnnnnnnnnnnnnnnnnnnnnnnnnnnnnnnnnnnnnnnnnnnnnnnnnnnnnnnnnnnnnnnnnnnnnnnnnnnnnnnnnnnnnnnnnnnnnnnnnnnnnnnnnnnnnnnnnnnnnnnnnnnnnnnnnnnnnnnnnnnnnnnnnnnnnnnnnnnnnnnnnnnnnnnnnnnnnnnnnnnnnnnnnnnnnnnnnnnnnnnnnnnnnnnnnnnnnnnnnnnnnnnnnnnnnnnnnnnnnnnnnnnnnnnnnnnnnnnnnnnnnnnnnnnnnnnnnnnnnnnnnnnnnnnnnnnnnnnnnnnnnnnnnnnnnnnnnnnnnnnnnnnnnnnnnnnnnnnnnnnnnnnnnnnnnnnnnnnnnnnnnnnnnnnnnnnnnnnnnnnnnnnnnnnnnnnnnnnnnnnnnnnnnnnnnnnnnnnnnnnnnnnnnnnnnnnnnnnnnnnnnnnnnnnnnnnnnnnnnnnnnnnnnnnnnnnnnnnnnnnnnnnnnnnnnnnnnnnnnnnnnnnnnnnnnnnnnnnnnnnnnnnnnnnnnnnnnnnnnnnnnnnnnnnnnnnnnnnnnnnnnnnnnnnnnnnnnnnnnnnnnnnnnnnnnnnnnnnnnnnnnnnnnnnnnnnnnnnnnnnnnnnnnnnnnnnnnnnnnnnnnnnnnnnnnnnnnnnnnnnnnnnnnnnnnnnnnnnnnnnnnnnnnnnnnnnnnnnnnnnnnnnnnnnnnnnnnnnnnnnnnnnnnnnnnnnnnnnnnnnnnnnnnnnnnnnnnnnnnnnnnnnnnnnnnnnnnnnnnnnnnnnnnnnnnnnnnnnnnnnnnnnnnnnnnnnnnnnnnnnnnnnnnnnnnnnnnnnnnnnnnnnnnnnnnnnnnnnnnnnnnnnnnnnnnnnnnnnnnnnnnnnnnnnnnnnnnnnnnnnnnnnnnnnnnnnnnnnnnnnnnnnnnnnnnnnnnnnnnnnnnnnnnnnnnnnnnnnnnnnnnnnnnnnnnnnnnnnnnnnnnnnnnnnnnnnnnnnnnnnnnnnnnnnnnnnnnnnnnnnnnnnnnnnnnnnnnnnnnnnnnnnnnnnnnnnnnnnnnnnnnnnnnnnnnnnnnnnnnnnnnnnnnnnnnnnnnnnnnnnnnnnnnnnnnnnnnnnnnnnnnnnnnnnnnnnnnnnnnnnnnnnnnnnnnnnnnnnnnnnnnnnnnnnnnnnnnnnnnnnnnnnnnnnnnnnnnnnnnnnnnnnnnnnnnnnnnnnnnnnnnnnnnnnnnnnnnnnnnnnnnnnnnnnnnnnnnnnnnnnnnnnnnnnnnnnnnnnnnnnnnnnnnnnnnnnnnnnnnnnnnnnnnnnnnnnnnnnnnnnnnnnnnnnnnnnnnnnnnnnnnnnnnnnnnnnnnnnnnnnnnnnnnnnnnnnnnnnnnnnnnnnnnnnnnnnnnnnnnnnnnnnnnnnnnnnnnnnnnnnnnnnnnnnnnnnnnnnnnnnnnnnnnnnnnnnnnnnnnnnnnnnnnnnnnnnnnnnnnnnnnnnnnnnnnnnnnnnnnnnnnnnnnnnnnnnnnnnnnnnnnnnnnnnnnnnnnnnnnnnnnnnnnnnnnnnnnnnnnnnnnnnnnnnnnnnnnnnnnnnnnnnnnnnnnnnnnnnnnnnnnnnnnnnnnnnnnnnnnnnnnnnnnnnnnnnnnnnnnnnnnnnnnnnnnnnnnnnnnnnnnnnnnnnnnnnnnnnnnnnnnnnnnnnnnnnnnnnnnnnnnnnnnnnnnnnnnnnnnnnnnnnnnnnnnnnnnnnnnnnnnnnnnnnnnnnnnnnnnnnnnnnnnnnnnnnnnnnnnnnnnnnnnnnnnnnnnnnnnnnnnnnnnnnnnnnnnnnnnnnnnnnnnnnnnnnnnnnnnnnnnnnnnnnnnnnnnnnnnnnnnnnnnnnnnnnnnnnnnnnnnnnnnnnnnnnnnnnnnnnnnnnnnnnnnnnnnnnnnnnnnnnnnnnnnnnnnnnnnnnnnnnnnnnnnnnnnnnnnnnnnnnnnnnnnnnnnnnnnnnnnnnnnnnnnnnnnnnnnnnnnnnnnnnnnnnnnnnnnnnnnnnnnnnnnnnnnnnnnnnnnnnnnnnnnnnnnnnnnnnnnnnnnnnnnnnnnnnnnnnnnnnnnnnnnnnnnnnnnnnnnnnnnnnnnnnnnnnnnnnnnnnnnnnnnnnnnnnnnnnnnnnnnnnnnnnnnnnnnnnnnnnnnnnnnnnnnnnnnnnnnnnnnnnnnnnnnnnnnnnnnnnnnnnnnnnnnnnnnnnnnnnnnnnnnnnnnnnnnnnnnnnnnnnnnnnnnnnnnnnnnnnnnnnnnnnnnnnnnnnnnnnnnnnnnnnnnnnnnnnnnnnnnnnnnnnnnnnnnnnnnnnnnnnnnnnnnnnnnnnnnnnnnnnnnnnnnnnnnnnnnnnnnnnnnnnnnnnnnnnnnnnnnnnnnnnnnnnnnnnnnnnnnnnnnnnnnnnnnnnnnnnnnnnnnnnnnnnnnnnnnnnnnnnnnnnnnnnnnnnnnnnnnnnnnnnnnnnnnnnnnnnnnnnnnnnnnnnnnnnnnnnnnnnnnnnnnnnnnnnnnnnnnnnnnnnnnnnnnnnnnnnnnnnnnnnnnnnnnnnnnnnnnnnnnnnnnnnnnnnnnnnnnnnnnnnnnnnnnnnnnnnnnnnnnnnnnnnnnnnnnnnnnnnnnnnnnnnnnnnnnnnnnnnnnnnnnnnnnnnnnnnnnnnnnnnnnnnnnnnnnnnnnnnnnnnnnnnnnnnnnnnnnnnnnnnnnnnnnnnnnnnnnnnnnnnnnnnnnnnnnnnnnnnnnnnnnnnnnnnnnnnnnnnnnnnnnnnnnnnnnnnnnnnnnnnnnnnnnnnnnnnnnnnnnnnnnnnnnnnnnnnnnnnnnnnnnnnnnnnnnnnnnnnnnnnnnnnnnnnnnnnnnnnnnnnnnnnnnnnnnnnnnnnnnnnnnnnnnnnnnnnnnnnnnnnnnnnnnnnnnnnnnnnnnnnnnnnnnnnnnnnnnnnnnnnnnnnnnnnnnnnnnnnnnnnnnnnnnnnnnnnnnnnnnnnnnnnnnnnnnnnnnnnnnnnnnnnnnnnnnnnnnnnnnnnnnnnnnnnnnnnnnnnnnnnnnnnnnnnnnnnnnnnnnnnnnnnnnnnnnnnnnnnnnnnnnnnnnnnnnnnnnnnnnnnnnnnnnnnnnnnnnnnnnnnnnnnnnnnnnnnnnnnnnnnnnnnnnnnnnnnnnnnnnnnnnnnnnnnnnnnnnnnnnnnnnnnnnnnnnnnnnnnnnnnnnnnnnnnnnnnnnnnnnnnnnnnnnnnnnnnnnnnnnnnnnnnnnnnnnnnnnnnnnnnnnnnnnnnnnnnnnnnnnnnnnnnnnnnnnnnnnnnnnnnnnnnnnnnnnnnnnnnnnnnnnnnnnnnnnnnnnnnnnnnnnnnnnnnnnnnnnnnnnnnnnnnnnnnnnnnnnnnnnnnnnnnnnnnnnnnnnnnnnnnnnnnnnnnnnnnnnnnnnnnnnnnnnnnnnnnnnnnnnnnnnnnnnnnnnnnnnnnnnnnnnnnnnnnnnnnnnnnnnnnnnnnnnnnnnnnnnnnnnnnnnnnnnnnnnnnnnnnnnnnnnnnnnnnnnnnnnnnnnnnnnnnnnnnnnnnnnnnnnnnnnnnnnnnnnnnnnnnnnnnnnnnnnnnnnnnnnnnnnnnnnnnnnnnnnnnnnnnnnnnnnnnnnnnnnnnnnnnnnnnnnnnnnnnnnnnnnnnnnnnnnnnnnnnnnnnnnnnnnnnnnnnnnnnnnnnnnnnnnnnnnnnnnnnnnnnnnnnnnnnnnnnnnnnnnnnnnnnnnnnnnnnnnnnnnnnnnnnnnnnnnnnnnnnnnnnnnnnnnnnnnnnnnnnnnnnnnnnnnnnnnnnnnnnnnnnnnnnnnnnnnnnnnnnnnnnnnnnnnnnnnnnnnnnnnnnnnnnnnnnnnnnnnnnnnnnnnnnnnnnnnnnnnnnnnnnnnnnnnnnnnnnnnnnnnnnnnnnnnnnnnnnnnnnnnnnnnnnnnnnnnnnnnnnnnnnnnnnnnnnnnnnnnnnnnnnnnnnnnnnnnnnnnnnnnnnnnnnnnnnnnnnnnnnnnnnnnnnnnnnnnnnnnnnnnnnnnnnnnnnnnnnnnnnnnnnnnnnnnnnnnnnnnnnnnnnnnnnnnnnnnnnnnnnnnnnnnnnnnnnnnnnnnnnnnnnnnnnnnnnnnnnnnnnnnnnnnnnnnnnnnnnnnnnnnnnnnnnnnnnnnnnnnnnnnnnnnnnnnnnnnnnnnnnnnnnnnnnnnnnnnnnnnnnnnnnnnnnnnnnnnnnnnnnnnnnnnnnnnnnnnnnnnnnnnnnnnnnnnnnnnnnnnnnnnnnnnnnnnnnnnnnnnnnnnnnnnnnnnnnnnnnnnnnnnnnnnnnnnnnnnnnnnnnnnnnnnnnnnnnnnnnnnnnnnnnnnnnnnnnnnnnnnnnnnnnnnnnnnnnnnnnnnnnnnnnnnnnnnnnnnnnnnnnnnnnnnnnnnnnnnnnnnnnnnnnnnnnnnnnnnnnnnnnnnnnnnnnnnnnnnnnnnnnnnnnnnnnnnnnnnnnnnnnnnnnnnnnnnnnnnnnnnnnnnnnnnnnnnnnnnnnnnnnnnnnnnnnnnnnnnnnnnnnnnnnnnnnnnnnnnnnnnnnnnnnnnnnnnnnnnnnnnnnnnnnnnnnnnnnnnnnnnnnnnnnnnnnnnnnnnnnnnnnnnnnnnnnnnnnnnnnnnnnnnnnnnnnnnnnnnnnnnnnnnnnnnnnnnnnnnnnnnnnnnnnnnnnnnnnnnnnnnnnnnnnnnnnnnnnnnnnnnnnnnnnnnnnnnnnnnnnnnnnnnnnnnnnnnnnnnnnnnnnnnnnnnnnnnnnnnnnnnnnnnnnnnnnnnnnnnnnnnnnnnnnnnnnnnnnnnnnnnnnnnnnnnnnnnnnnnnnnnnnnnnnnnnnnnnnnnnnnnnnnnnnnnnnnnnnnnnnnnnnnnnnnnnnnnnnnnnnnnnnnnnnnnnnnnnnnnnnnnnnnnnnnnnnnnnnnnnnnnnnnnnnnnnnnnnnnnnnnnnnnnnnnnnnnnnnnnnnnnnnnnnnnnnnnnnnnnnnnnnnnnnnnnnnnnnnnnnnnnnnnnnnnnnnnnnnnnnnnnnnnnnnnnnnnnnnnnnnnnnnnnnnnnnnnnnnnnnnnnnnnnnnnnnnnnnnnnnnnnnnnnnnnnnnnnnnnnnnnnnnnnnnnnnnnnnnnnnnnnnnnnnnnnnnnnnnnnnnnnnnnnnnnnnnnnnnnnnnnnnnnnnnnnnnnnnnnnnnnnnnnnnnnnnnnnnnnnnnnnnnnnnnnnnnnnnnnnnnnnnnnnnnnnnnnnnnnnnnnnnnnnnnnnnnnnnnnnnnnnnnnnnnnnnnnnnnnnnnnnnnnnnnnnnnnnnnnnnnnnnnnnnnnnnnnnnnnnnnnnnnnnnnnnnnnnnnnnnnnnnnnnnnnnnnnnnnnnnnnnnnnnnnnnnnnnnnnnnnnnnnnnnnnnnnnnnnnnnnnnnnnnnnnnnnnnnnnnnnnnnnnnnnnnnnnnnnnnnnnnnnnnnnnnnnnnnnnnnnnnnnnnnnnnnnnnnnnnnnnnnnnnnnnnnnnnnnnnnnnnnnnnnnnnnnnnnnnnnnnnnnnnnnnnnnnnnnnnnnnnnnnnnnnnnnnnnnnnnnnnnnnnnnnnnnnnnnnnnnnnnnnnnnnnnnnnnnnnnnnnnnnnnnnnnnnnnnnnnnnnnnnnnnnnnnnnnnnnnnnnnnnnnnnnnnnnnnnnnnnnnnnnnnnnnnnnnnnnnnnnnnnnnnnnnnnnnnnnnnnnnnnnnnnnnnnnnnnnnnnnnnnnnnnnnnnnnnnnnnnnnnnnnnnnnnnnnnnnnnnnnnnnnnnnnnnnnnnnnnnnnnnnnnnnnnnnnnnnnnnnnnnnnnnnnnnnnnnnnnnnnnnnnnnnnnnnnnnnnnnnnnnnnnnnnnnnnnnnnnnnnnnnnnnnnnnnnnnnnnnnnnnnnnnnnnnnnnnnnnnnnnnnnnnnnnnnnnnnnnnnnnnnnnnnnnnnnnnnnnnnnnnnnnnnnnnnnnnnnnnnnnnnnnnnnnnnnnnnnnnnnnnnnnnnnnnnnnnnnnnnnnnnnnnnnnnnnnnnnnnnnnnnnnnnnnnnnnnnnnnnnnnnnnnnnnnnnnnnnnnnnnnnnnnnnnnnnnnnnnnnnnnnnnnnnnnnnnnnnnnnnnnnnnnnnnnnnnnnnnnnnnnnnnnnnnnnnnnnnnnnnnnnnnnnnnnnnnnnnnnnnnnnnnnnnnnnnnnnnnnnnnnnnnnnnnnnnnnnnnnnnnnnnnnnnnnnnnnnnnnnnnnnnnnnnnnnnnnnnnnnnnnnnnnnnnnnnnnnnnnnnnnnnnnnnnnnnnnnnnnnnnnnnnnnnnnnnnnnnnnnnnnnnnnnnnnnnnnnnnnnnnnnnnnnnnnnnnnnnnnnnnnnnnnnnnnnnnnnnnnnnnnnnnnnnnnnnnnnnnnnnnnnnnnnnnnnnnnnnnnnnnnnnnnnnnnnnnnnnnnnnnnnnnnnnnnnnnnnnnnnnnnnnnnnnnnnnnnnnnnnnnnnnnnnnnnnnnnnnnnnnnnnnnnnnnnnnnnnnnnnnnnnnnnnnnnnnnnnnnnnnnnnnnnnnnnnnnnnnnnnnnnnnnnnnnnnnnnnnnnnnnnnnnnnnnnnnnnnnnnnnnnnnnnnnnnnnnnnnnnnnnnnnnnnnnnnnnnnnnnnnnnnnnnnnnnnnnnnnnnnnnnnnnnnnnnnnnnnnnnnnnnnnnnnnnnnnnnnnnnnnnnnnnnnnnnnnnnnnnnnnnnnnnnnnnnnnnnnnnnnnnnnnnnnnnnnnnnnnnnnnnnnnnnnnnnnnnnnnnnnnnnnnnnnnnnnnnnnnnnnnnnnnnnnnnnnnnnnnnnnnnnnnnnnnnnnnnnnnnnnnnnnnnnnnnnnnnnnnnnnnnnnnnnnnnnnnnnnnnnnnnnnnnnnnnnnnnnnnnnnnnnnnnnnnnnnnnnnnnnnnnnnnnnnnnnnnnnnnnnnnnnnnnnnnnnnnnnnnnnnnnnnnnnnnnnnnnnnnnnnnnnnnnnnnnnnnnnnnnnnnnnnnnnnnnnnnnnnnnnnnnnnnnnnnnnnnnnnnnnnnnnnnnnnnnnnnnnnnnnnnnnnnnnnnnnnnnnnnnnnnnnnnnnnnnnnnnnnnnnnnnnnnnnnnnnnnnnnnnnnnnnnnnnnnnnnnnnnnnnnnnnnnnnnnnnnnnnnnnnnnnnnnnnnnnnnnnnnnnnnnnnnnnnnnnnnnnnnnnnnnnnnnnnnnnnnnnnnnnnnnnnnnnnnnnnnnnnnnnnnnnnnnnnnnnnnnnnnnnnnnnnnnnnnnnnnnnnnnnnnnnnnnnnnnnnnnnnnnnnnnnnnnnnnnnnnnnnnnnnnnnnnnnnnnnnnnnnnnnnnnnnnnnnnnnnnnnnnnnnnnnnnnnnnnnnnnnnnnnnnnnnnnnnnnnnnnnnnnnnnnnnnnnnnnnnnnnnnnnnnnnnnnnnnnnnnnnnnnnnnnnnnnnnnnnnnnnnnnnnnnnnnnnnnnnnnnnnnnnnnnnnnnnnnnnnnnnnnnnnnnnnnnnnnnnnnnnnnnnnnnnnnnnnnnnnnnnnnnnnnnnnnnnnnnnnnnnnnnnnnnnnnnnnnnnnnnnnnnnnnnnnnnnnnnnnnnnnnnnnnnnnnnnnnnnnnnnnnnnnnnnnnnnnnnnnnnnnagcagtctcagaaacttttctgtgatgactgcattcaactcagagagttgaacactccttttgagagcgcagttttgaaactctcgttctctgtttcaaaacttgcagagttttgaaggggacatgcaggggacatgcagacctctttgaaggtttcgttggaaagggaatcatcttcacataaaaattacacagaagcattctcaggaactccttggtgatgtttgtattcaacttccagagttgaactttccttcggaatgagcagctatgaaacaccctttttctagaatctgcaagtggacattgggagggctgtgaggtttgtggtggaaaaggaaatatctccacataaatactagatagaagccttctcagaaactactttgtgatgattgcattcacctcacggagtggagcattcctattgacagagcaggttggaaacactcttgttgtagaatctgctagtggagatttggagcgctttgaggcctatggtagtaaagggaagagcttcacataaaatctagacagaagcattctcagaaaatactttgtgatgattgagtttaacacacagagctgaacattcctttggatggagaaggtttgaaacacactttctatagaatctgcgagtggatatttggacctctctgaggatttcgttggaaacgggataactgcacctaactaaacggaagcattctcacaaaaatctttgtgatgtttgcattcaaatcccagagttgaaccttcctttgatagttcagctttgaaacactctttttgtaggatctgcaggtggatatttggaccactctttggccttcgttcgaaaagggtacatcttcaaataaaatctagacagaagccttctcagtaacttctctgtgacgattgcattcaactcaaagcgttgaaccctcctatggatagagcagttttgaatctctctttttgtggaatcttcaagtggatgtgtggtcctctttgaagatgtctttggaaacgggaatatcttcacataaaaactaaacagaagcattctcagaaacttctctgtgatgtttgtgttcaactcacagagtttcacgttgcttttcatagagcagatgagaaacatgcttttcgtagggtctgcaagtggacatttggagagatttcagccctgtggtggaaaacgaattatcgtcacgtaaaaactagagagaagcattgtcggaaacttgtttgtgatgattgcattcaactcacagagttgaaggttccttttcaaacatcagtttccaaacactctttctgtggaatctggaagaggatatttggacctctttgaagatttcgttggaaacgggataatcttcacagaaaagctaaacagaagcattctcagaaccttcttcgtgatgtttgcattcaactcacagtgttgaacctttctttgatagttcaggtttgaaacactctttttgtagaaactgcaggtggataattgtacttctttgaggcctatcatagtaaaggaaataacttcatataaaaacaagacagatgcattctcagaaactactttgtgacgatggcattcaagtcacagaggtgaacattccctttcagagagcactttggaaactctcgttgtgtagaatctgcaagtggagatatggaccgctttgaggcctatggtagtaaaggaaacagcttcatataaaaactagacagcagcattctcagaaaactctttgtgacgactgagtttaactcacagggctgaacattcctttggacggagctgtttggaaacacactatctgtaggatctgcaagcagatacttgggcctccctgaggatttcgttggaaacgggataaaccgcacagaactaaacagaagcattctcagaaccttcttcgtgatgtttgcattcaacccacagtgttgaacctttctttgatagttcaggtttgaaacactctttttgtagaaactgcaagtggataactgcacttctttgaggcctatcgtagtaaaggaaataaattcctataaaaacaagacagaagctttctcagaaaattctctgggatgactgagttgaactcacagagctgtactttccttgggaaggagtagtttctcaacacactttctgtagaatctgcaagtggatatttggacctctctgctgaattcgttggaaaccagataatttcagctaactaaacagaagcagtctcagaatcttcttgtgatgtttgcattcaaatcccagaatggaaccttcctttgaaagttcaggttggaaacactctttttgcaggatctacaagtggatattcggaccactctgtggacttcgttcgaaacgggtatatcttcacataacatctagacagaagcattctcagaaacttttctgtgatgactgcattcaactcacagagttgaacactccttttgagagcgcagttttgaaactctctttctctggaatctgcaaggggacatgcagacctctttgaaggtttcgttggaaacggaatcatcttcacataaaaattacacggaagcatcctcaggaactccttggtgatgtttgtattcaacttccagagctgaactttccttcggagagagcagctatgaaacactctttttctagaatctgcaagtggacattgggaaggctgtgaggtttgtggtggaaaaggaaatatctccacataaatactagatagaagccttctcagaaactactttgtgatgactgcattcacctcacggagtggagcattcctattgacagagcagtttggaaacactcttcttgtagaatcggctagtggagagttggagcgctttgaggcctatggtagtaaagggaagagcttcacataaaatctagacagaagcattctcagaaaatactttgtgatgattgagtttaacacacagagctgaacattcctttggatggagaaggtttgaaacacactttctgtagaatctgcgagtggatatttggacctctctgaggatttcgttggaaacgggataactgcagctaactaaacggaagcattctcacaaaattctttgtgatgtttgcattcaaatcccagagttgaaccttcctttgagagttcagctttgaaacactctttttgtaggctctgcaggtggatatttggaccactctttggccttcgttcaaaacgggtacatcttcaaataaaatctagacagaagccttctcagaaacttctctgtgatgattgcattcaactcaaagcgttgaaccctcctatggatagagcagttttgaatctctctttttgtggaatctgcaagtggatatgtggtcctctttgaagatgtctttggaaacgggaatatcttcatattaaatctaaacagaagcattctcagaaacttctctgtgatgtttgtgtccaaatcacagagtttcacgttgcttttcatagagcagatgagaaacatgcttttcgtagggtctgcaagtggacatttggagagatttcaggcctgtggtggaaaacgaattatcgtcacgtaaaaactagagggaagcattgtcagaaacttgtttgtgatgactgcattcaactcacagagttgaaggtttcttttcaaacagcagtttccaaacactctttctgtggcatctgcaagtggatgtttgggcctctttgaagatttcgttggaaacaggataatcttcacagaaaagctaaacagaagcattctcagaaacttctttgtgatgtttgctttcaactcacagagttgaactttccttttgagagagaagctttgaaacacactttttctagaatctgcaagtggatatttggagggctttgaggcctgtggtggaaaaggaattatcttcccgtaagaactacatagatgcattctcagaaactactttgtgacgattgcattcaagtcacagaggtgaacattccctttcacagagcactttggaaactctcgttgtgtagaatctgcaagtggagatatggaccgctttgaggcctatggtagtaaaggaaacagcttcatataaaaactagacagcagcattgtcagaaaaccctttgtgaagactgagtttaactcacagggctgaacattcctttggatggagcagtttggaaacacactatctgtaggatctgcaagcggatacttgggcctctctgaggatttcgttggaaacgggataaaccacacagaactaaacagaagcattctcagaagcttcttcgtgatgtttgcattcaacccacagtgttgaacctttctttgctagttcaggtttgaaacactctttttgtagaaactgcaagtggataactgcacttctttgaggcctatcgtagtaaaggaaataacttcctataaaaacaagacagaagctttctcagaaaattctctgggatgattgtgttgaactcacagagcagtactttccttgggatggagtagtttcgaagcacactttctgtagaatctgcaagtggatatttggacctgtctgaggaatactttgcaaacgggataatttcagctaagtaaacagaaagcagtctcagaatcttcttgtgatgtttgcattcaaatcccagaattgaaccttcctttgaaagttcaggttggaaacactctttttgcaggatctacaagtggatattcggaccacactgtggacttcgttcgaaacgggtatatcttcacataacatctagacagagcattctcagaaacttttctgtgatgactgcattcaactcacagagttgaactctccttttgagagcgcagttttgaaactctctttctctggaatctgcaaggggacatgcagacctctttgaaggtttcgttggaaacggaatcatcttcacataaaaattacacagaagcattctcaggaactccttggtgatgtttgtattcaacttccagagttgaactttccttcggaaagagcagctatgaaacactctttttctagaatctgcaagtggacattgggagggctgtgaggtttgtggtggaaaaggaaatatctccacataaatactagatagaagccttctcagaaactactttgtgatgattgcattcacctcacggagtggagcattcctattgacagagcagtttggaaacactcttattgtagaatctgctagtggagatttggagcgctttgaggcctatggtagtaaagggaagagcttcacataaaatctagacagaagcattctcagaaaatactttgtgatgattgagtttaacacacagagttgcacattcctttggatggagaaggtttgaaacacactttctgtagaatctgcgagtggatatttggaactctctgaggatttcgttggaaacgggataactgcacctaactaaacggaagcattctcacaaaattctttgtgatgtttgcattcaaatcccagagttgaaccttcctttgatagttcagctttgaaacactctttttgtaggatctgcaggtggatatttggaccactcttaggccttcgttcgaaaagggtacatcttcaaataaaatctagacagaagtcttctcagaaacttctctgtgacgattgcattcaactcaaagcgttgaaccctcctatggatagagcagttttgaatctctctttttgtggaatctgcaagtggatatgtggtcctctttgaagatgtctttggaaacgggaatatcttcacataaaaactaaacagaagcattctcagaaacttctctgtgatgtttgtgttcaactcacagagtttcacgttgcttttcatagagcagatgagaaacatgcttttcgtagggtctgcaagtggacatttggagagatttccggcctgtggtggaaaacgaattatcgtcacgtaaaaactagagagaagcattgtcagaaacttgtttgtgatgactgcattcaactcacagagttgaaggttccttttcaaacagcagtttccaaacactctttctgtggcatctgcaagtggatgtttgggcctctttgaagatttcgttggaaacgggataatcttcacagaaaagctaaacagaagcattctcagaaacttctttgtgatgtttgctttcaactcacagaagttgaactttccttttgagagagaagctttgaaacactctttttctagaatctgcaagtggatatttggagggctttgaggcctgaggtggaaaaggaattatcttcccgtcagaactagatagatgcattctcagaaactactttgtgacgattgcattcaagtcacagaggtgaacattccctttcagagagcactttggaaactctcgttgtgtagaatctgcaagtggagacatggaccgctttgaggcctatggtagtaaaggaaacagcttcgtataaaaattagacagcagcattctcagaaaactctttgtgatgactgagtttaactcacagggctgaacattcctttggatggagcagtttggaaacacactatctgtaggatctgcaagcggatacttgggcctctctgaggatttcgttggaaacgggataaaccgcacagaactaaacagaagcattctcagaaccttcttcgtgatgtttgcattcaacccacagtgttgaacctttctttgatagttcagctttgaaacactctttttgtaggatctgcaggtggatatttggaccactctttggccttcgttcgaaacgggtacatcttcaaataaaatctagacagaagccttctcagaaacttctctgtgacgattgcattcaactcaaagagttgaaccctcctatggatagagcagttttgaatctctctttttgtggaatctgcaagtggatatgtggtcctctttgaagatgtctttggaaacgggaatatcttcacataaaaactaaacagaagcattctcagaaacttctctgtgatgtttgtgttcaactcacagagtttcacgttgcttttcatagagcagatgagaaacatgcttttcgtagggtctgcaagtggacatttggagagatttccggcctgtggtggaaaacgaattatcgtcacgtaaaaactagagagaagcattgtcagaaacttgtttgtgatgactgcattcaactcacagagttgaaggttccttttcaaacagcagtttccaaacactctttctgtggcatctgcaagtggatgtttgggcctctttgaagatttcgttggaaacgggataatcttcacagaaaagctaaacagaagcattctcagaaacttctttgtgatgtttgctttcaactcacagagttgaactttccttttgagagagaagctttgaaacactctttttctagaatctgcaagtggatatttggagggctttgaggcctgaggtggaaaaggaattatcttcccgtaagaactagatagatgcattctcagaaactactttgtgacgattgcattcaagtcacagaggtgaacattccctttcagagagcactttggaaactctcgttgtgtagaatctgcaagtggagatatggaccgctttgaggcctatggtagtaaaggaaacagcttcatataaaaactagacagcagcattctcagaaaactctttgtgacgactgagtttaactcacagggctgaacattcctttggatggagcagtatggaaacacactatctgtaggatctgcaagcggatacttgggcctccctgaggatttcgttggaaacgggataaaccgcacagaactaaacagaagcattctcagaaccttcttcgtgatgtttgcattcaacccacagtgttgaacctttctttgatagttcaggtttgaaacactctttctgtagaaactgcaagtggataactgcacttctttgaggcctatcgtagtaaaggaaataacttcctataaaaacaagacagaagctttctcagaaaattctctgcgatgattgagttgaactcacagagcagtactttccttgggatggagtagtttcgaaacacactttctgtagaatctgcaagtggatatttggacctgtctgaggaattcgttgcaaacgggataatttcagctaagtaaacagaagcagtctcagaatcttcttgtgatgtttgcattcaaatcccagaattgaaccttcctttgaaagttcaggtttgaaacactctttttgcaggatctacaagtggatatttggaccactctgtggacttcgatcgaaacgggtatatcttcacataacatctacacagaagcattctcagaaacttttctgtgatgactgcattcaactcacagagttgaacactcctttcgagagcgcagttttgaaactctctttctctggaatctgcaaggggacatgcacacctctttgaaggtttcattggaaacggaatcatcttcacataaaaattacacagaagcattctcaggaattccttggtgatgtttgcattcaacttccagagttgaacttcccttcggaaagagcagctatgaaacactctttttctagaatctgcaagtggacattgggagggctgtgaggtttgtggtggaaaaggaaatatctccacataaatactagatagaagacttctcagaaactacgttgtgatgattgcattcacctcacggagtggagcattcctattgacagagcagtttggaaacacccttgttgtagaatctgctagtggagatttggagcgctttgaggcctatggtagtaaagggaagagcttcacataaaatctagacagaagcattctcagaaaatactttgtgatgattgagtttaacacacagagctgaacattcctttggatggaggaggtttgaaacacactttctgtagaatctgcgagtggatatttggacctctctgaggatttcgttggaaacgggataactgcacctaactaaacggaagcattctcacaaaattctttgtgatgtttgcattcaaatcccagagttgaaacttcctttgatagttcagctttgaaacactcgttttgtaggatctgcaagtgcatatttagaccactctttggccttcgttcgaaacgggtacatcttcaaataaaatctagacagaagccttctcagaaacttctctgtgacgattgcattcaactcacagcgttgaaccctcctatggatagagcaggtttgaatctctctttttgtggaatctgcaagtggatgtgtggtcctctttgaagatgtctttggaaacgggaatatcttcacataaaaactaaacagaagcattctcagaaacttctctgtgatgtttgtgttcaactcacagagcttcacgttgcttttcatagagcagatgagaaacatgcttttcatagggtctgcaagtggacatttggagagctttcaggcctgtggtggaaaacgaattatcgtcacgtaaaaactagagagaagcattgtcagaaacttgtttgtgatgactgccttcaactcacagagttgaaggttccttttcaaacagcagtttccaaacactctttctgtggcatctgcaagtggaggtttgggcctctttgaagatttcgttggaaacgggataatcttcacagaaaagctaaacagaagcattctcagaaacttctttgtgatgtttgctttcaactcacagagttgaactttccttttgagagagaagctttgaaacactctttttctagaatctgcaagaggatatttggagggctttgaggcctgaggtggaaaaggaattatcttcccgtaagaactagatagatgcattctcagaaactactttgtgacgattgcattcaagtcacagaggtgaacattccctttcagagagcactttggaaactctcgttgtgtagaatctgcaagtggagatatggaccgctttgaggcctatggtagtaaaggaaacagcttcatataaaaactagacagcagcattctcagaaaactctttgtgacgactgagtttaactcacagggctgaacattcctttggatggagcagtttggaaacatactatctgtaagatctgcaagtggatacttgggcctccctgaggatttcgttggaaacgggataaaccacacagaactaaacagaagcattctcagaaccttcttcgtgacgtttgcattcaaccctcagtgttgaaccattctttgatagttcaggtttgaaacactctttttgtagaaactgcaagtggataactgcacttctttgaggcctatcgtagtaaaggaaataacttcctataaaaacaagacagaagctttctcagaaaattctctgggatgattgagttgaactcacagagcagtactttccttgggatggagtagtttcgaaacacactttctgtagaatctgcaagtggatatttggacttgtctgaggaattcgttgcaaacgggataatttcagctaagtaaacagaagcagtctcagaatcttcttgtgatgtttgcattcaaatcccagaattgaaccttcctttgaaagttcaggtttgaaacactctttttgcagggtctacaagtggatattcggaccactctgtggacttcgttcgaaacgggtatatcttcacataacatctagacagaagcattctcagaaacttttctgtgatgactgcattcaactcacagagttgaacactccttttgagagcgcagtttggaaactctctttctctggaatctgcaaggggacatgcagacctctttgaaggtttcgttggaaacggaatcatcttcacataaaaattacacagaagcatcctcaggaactccttggtgatgtttgtattcaacttccagagttgaactttccttcggaaagagcagctatgaaacactctttttctagaatctgcaagtggacattgggagggctgtgaggtttgtggtggaaaaggaaatatctccacataaatactagatagaagccttctcagaaactactttgtgatgattgcattcacctcacggagtggagcattcctattgacagagcagtttggaaacactcttcttgtagaatcggctagtggagatttggagcgctttgagtcctatggtagtaaagggaagagcttcacataaaatctagacagaagcattctcagaaaatactttgtgatgattgagtttaacacacagagctgaacattcctttggatggagaaggtttgaaccacactttctgtagaatctgcgagtggatatttggacctctctgaggatttcgttggaaaccggataactgcacctaactaaacggaagcattctcacaaaattctttgtgatgtttgcattcaaatcccagtagttgaaccttcctttgatagttcagctttgaaacactctttttgtaggatctgcaagtggatatttggaccactctttggccttcgttcgaaacgggtacatattcaaataaaatctagacagaagccttctcagaaacttctctgtgacggttgcattcaactcaaagcgttgaaacctcctatggatagagcagttttgaatctctctttttgtggaatctgcaagtggatatgtggtcctctttgaagatgtctttggaaacgggaatatcttcacattaaaactaaacagaagcattctcagaaacttctctgtgatgtttgtgttcaactcacagagtttcacgttgcttttcatagagcagatgagaaacatgcttttcgtagggtctgcaagtggacatttggagagctttcaggcctgtggtggaaaacgaattatcgtcacgtaaaaactagagagaagcattgtcagaaacttgtttgtgatgactgcattcaactcacagagttgaaggttccttttcaaacagcagtttccaaacactctttctgtggcatctgcaagtggatgtttgggcctctttgaagatttcgttggaaacgggataatcttcacagaaaagctaaacagaagcatgctcagaaacttctttgtgatgtttgctttcaactcacagagttgaactttccttttgagagagaagctttgaaacactctttttctagaatctgcaagtggatatttggagggctttgaggcctgaggtggaacaggaattatcttcccgtaagaactagatagatgcattctcagaaactactttgtgacgattgcattcaagtcacagaggtgaacattccctttcagagagcactttggaaactctcgttgtgtagaatctgcaagtggagatatggaccgctttgaggcctatggtagtaaaggaaacagcttcatataaaaactagacagcagcattctcagaaaactctttgtgacgactgagttaaactcacagggctgaacattcctttggatggagcagtttggaaacacactatctgtaggatctgcaagcggatacttgggcctccctgaggatttcgtgggaaacgggataaaccgcacagaactaaacagaagcattctcagaaccttcttcatgatgtttgcattcaacccacagtgttgaacctttctttgatagttcaggtttgaaacactctttttgtagaaactgcaagtggataactgcacttctttgaggcctatcgtagtaaaggaaataacttcctataaaaacaagacagaagctttctcagaaaattctctgggatgattgagttgaactcacagagcagtactttccttgggatggagtagtttcgaaacacactttctgtagaatctgcaagtggatatttggacctgtctgaggaattcgttgcaaacgggataatttcagctaagtaaacagaagcagtctcagaatcttcttgtgatggttgcattcaaatcccagaattgaaccttcctttgaaagttcaggttggaaacactctttttgcaggatctacaagtggatattcggaacactctgtggacttcgttcgaaacgggtatatcttcacataacatctagacagaagcattctcagaaacttttctgtgatgactgcactcaactcacagagttgaacactccttttgagagcgcagttttgaaactctctttctctggaatctgcaaggggacatgcagaactctttgaaggtttcgttggaaacggaatcatcttcacataaaaattacacagaagcatcctcaggaactccttggtgatgtttgtattcaacttccagagttgaactttccttcggaaagagcagctatgaaacactctttttctagaatctgcaagtggacattgggagggctgtgaggtttgtggtggaaaaggaaatatctccacataaatactagatagaagccttctcagaaactactttgtgatgattgcattcacctcacggagtggagcattcctattgacagagcagtttggaaacactcttcttgtagaatcggctagtggagatttggagcgctttgaggcctatggtagtaaagggaagagcttcacataaaatctagacagaagcattctcagaaaatactttgtgatgattgagtttaacacacagagctgaacattcctttggatggagaaggttggaaccacactttctgtagaatctgcgagtggatatttggacctctctgaggatttcgttggaaacgggataactgcacctaaataaacggaagcattctcacaaaattcttcgtgatgtttgcattcaaatcccagagttgaaccttcctttgatagttcagctttgaaacactctttttgtaggatctgcaagtgtttatttggaccactctttggccttccttcgaaacgggtacatcttcatataaaatctagacagaagccttctcagaaacttctctgtgacgattgcattcaactcaaagcgttggaccctcctatggatagagcagttttgaatctctgtttttgtggaatctgcaagtggatgtgtggtcctctttgaagatgtctttggaaacgggaatatcttcacataaaaactaaacagaagcattctcagaaacttctctgtgatgtttgtgttcaactcacagagtttcacgttgctattcatagagcagatgagaaacatgcttttcgtagggtctgcaagtggacatttcgagagatttccggcttgcggtggaaaacgaattatcgtcacgtaaaaactagagagaagcattgtcagaaacttgtttgtgatgactgcattcaactcacagagttgaaggttccttttcaaacagcagtttccaaacactctttctgtggcatctgcaagtggatgtttgggcctctttgaagatttcgttggaaacgggataatcttcacagaaaagctaaacagaagcattctcagaaacttctttgtgatgtttgctttcaactcacagagttgaaatttccttttgagagagaagctttgaaacactctttttctagaatctgcaagtggatatttggagggctttgaggcctgaggtggaaaaggaattatcttcccgtaagaactagatagatgcattctcagaaactactttgtgacgattgcattcaagtcacagaggtgaacattccctttcagagagcactttggaaactctcgttgtgtagaatctgcaagtggagatatggaccgctttgaggcctatggtagtaaaggaaacagcttcatataaaaactagacagcagcattctcagaaaactctttgtgacgactgagtttaactcacagggctgaacattcctttggatggagcagtttggaaacacactatctgtaggatctgcaagcggatacttgggcctctctgaggattgcgttggaaacgggataaaccgcacagaacgaaacagaagcattctcagaaccttcttcgtgatgtttgcattcaacccagagtgttgaacctttctttgatagttcaggtttgaaacactctttttgtagaaactgcaagtggataactgcacttctttgaggcctatcgtagtaaaggaaataacttcctataaaaacaagacagaagctttctcagaaaattctctgggatgattgagttgaactcacagagcagtactttccttgggatggagtagtttcgaaacacactttctgtagaatctgcaagtggatatttcgacctgtctgaggaattcgttgcaaacgggataatttcagctaagtaaacagaagcagtctcagaatcttcttgtgatgtttgcattcaaatcccagaattgaaccttcctttgaaagttcaggtttgaaacactctttttgcaggatctacaagtggatattcggaccactctgtggacttcgatcgaaacgggtatatcttcacataacatctagacagaagcattctcagaaacttttctgtgatgactccattcaactcacagagttgaacactccttttgagagcgcagttttgaaactctctttctctggaatctgcaaggggacatgcagacctctttgaaggtttcgttggaaacggaatcatcttcacataaaaattacacagaagcatcctcaggaactccttggtgatgtttgtattcaacttccagaggtgaactttccttcggaaagagcagctatgaaacactctttttctagaatctgcaagtggacattgggagggctgtgaggtttgtggtggaaaaggaaatatctccacataaatactagatagaagccttctcagaaactacgttgtgatgattgcattcacctcacggagtggagcattcctattgacagagcagtttggaaacactcttgttgtagaatctgctagtggagatttggagcactttgaggcctatggtagtaaagggaagagcttcacataaaatctagacagaagcattctcagaaaatactttgtgatgattgagtttaacacacagagctgaacattcctttggatggatcaggtttgaaacacactttctgtagaatctgcgagtggatatttggacctctctgaggatttcgttggaaacgggataactgcacctaactaaacggaagcattctcacaaaattcttcgtgaggtttgcattcaaaccccagagttgaaccttcctttgatagttcagctttgaaacactctttttgtaggatctgcaagtggatatttggaccacactttggccttccttcgaaacgggtacatcttcaaataaaatctagacagaagccttctcagaaacttctctgtgacgattgcattcaacacaaagcgttgaaccctcctatggatagagcagttttgaatctctctttttgtggaatctgcaagtggatatgtggtactctttgaagatgtctttggaaacgggaatatcttcacataaaaactaaacagaagcattctcagaaacttctctgtgatgtttgtgtccaaatcacagagtttcacgttgcttttcatagagcagatgagaaacatgcttttcgtagggtctgcaagtggacgtttggagagatttcaggcctgtggtggaaaacgaattatcgtcacgtaaaaactagagggaagcattgtcagaaacttgtttgtgatgactgcattcaactcacagagttgaaggttccttttcaaacagcagtttccaaacactctttctgtggcatctgcaagtggatgtttgggcctctttgaagatttcgttggaaacgggataatcttcacagaaaagctaaacagaagcattctcagaaacttctttgtgatgtttgctttcaactcacagagttgaactttccttttgagagagaagctttgaaacactctttttctagaatctgcaagtggatatttggagggctttgaggcctgaggtggaaaaggaattatcttcccgtaagaactagatagatgcattctcagaaactactttgtgacgattgcattcaagtcacagaggtgaacattccctttcagagagcactttggaaactctcgttgtgtagaatctgcaagtggagatatggaccgcttttggcctatggtagtaaaggaaacagcttcatataaaaactagacagcagcattctcagaaaactctttgtgacgactgagtttaactcacagggctgaacattcctttggatggagcagtttggaaacacactatctgtaggatctgcaagcggatacttgggcctctctgaggatgtcgttggaaacggaataaaccgcacagaactaaacagaagcattctcagaaccttcttcgtgacgtttgcattcaacccacagtgttgaaactttctttgatagttcaggtttgaaacactcttttcgtagaaaatgcaagtggataactgcacttctttgaggcctatcgtagtaaaggaaataacttcctataaaaacaagacagaagctttctcagaaaattctctgggatgattgagttgaactcacagagcagtactttccttgggatggagtagtttcgaaacacactttctgtagaatctgcaagtggatatttggacctgtctgaggaattcgttgcaaacgggataatttcagctaagtaaacagaagcagtctcagaatcttcttgtgatgtttgcattcaaatcccagaattgaaccttcctttgaaagttcaggttggaaacactctttttgcaggatctacaagtggatattcggaccactctgtggacttcgttcgaaacgggtatatcttcacataacatctagacagaagcattctcagaaacttttctgtgatgactgcattcaactcacagagttgaacactacttttgagagcgcagttttgaaactctctttctctggaatctgcaaggggacatccagacctctttgaaggtttcgttggaaacggaatcatcttcacataaaaattacacagaagcatcctcaggaactccttggtgatgtttgtattcaacttccagagttgaactttccttcggaaagagcagctatgaaacactctttttctagaatctgcaagtggacattgggagggctgtgaggtttgtggtggaaaaggaaatatctccacataaatactagatagaagccttctcagaaactactttgtgatgattgcattcacctcacggagtggagcattcctattgacagagcagtttggaaacactcttcttgtagaatcggctagtggagatttggagcgctttgaggcctatggtagtaaagggaagagcttcacataaaatctagacagaagcattctcagaaaatactttgtgatgattgagtttaacacacagagctgaacattcctttggatggagaaggtttgaaacacactttctgtagaatctgcgagtggatattgggacctctctgaggatttctttggaaaccggataactgcacctaactaaacggaagcattctcacaaaattctttgtgatgtttgcattcaaatcccagagttgaaccttcctttgatagttcagctttggaacactctttttgtaggatctgcaggtggatatttggaccactctttggccttcgttcaaaacgggtacatcttcaaataaaatctagacagaagccttctcagaaacttctctgtgatgattgcattcaaatcaaagcgttgaaccctcctatggatagagcagttttgaatctctctttttgtggaatctgcaagtggttgtgtggtcctctttgaagatgtctttggaaacgggaatatcttcacataaaaactaaacagaagcattctcagaaacttctctgtgatgtttgtgttcaactcacagagtttcacgttgcttttcatagagcagatgagaaacatgcttttcgtagggtctgcaagtggacatttggagagatatccggcctgtggtggaaaacgaaatatcgtcacgtaaaaactagagagaagcattgtcagaaacttgtttgtgatgactgcattcaactcacagagttgaaggttccttttcaaacagcagtttccaaacactctttctgtggcatctgcaagtggatgtttgggcctctttgaagatttcgttggaaacgggataatcttcacagaaaagctaaacagaagcattctcagaaacttctttgtgatgtttgctttcaactcacagagttgaactttccttttgagagagaagctttgaaacactctttttctagaatctgcaagtggatatttggagggctttgaggcctgaggtggaaaaggaattatcttcccgtaagaactagatagaatgcattctcagaaagtactttgtgacgattgcattcaagtcacagaggtgaacattccctttcacagagcactttggaaactctcgttgtgtagaatctgcaagtggagatatggactgctttgaggcctatggtagtaaaggaaacagcttcatataaaaactagacagcagcattctcagaaaactctttgtgacgactgagtttaactcacagggctgaacattcctttggatggagcagtttggaaacacactatctgtaggatctgcaagcggatacttgggcctccctgaggatttcgttggaaacgggataaaccgcacagaactaaacagaagcattctcagaaccttcttcctgatgtttgcattcaacccacagtgttgaacctttctttgatagttcaggtttgaaacactctttttgtagaaactgcaagtggataactgcacttctttgaggcctatcgtagtaaaggaaataacttcctataaaaacaagacagaagctttctcagaaaattctctgagatgattgagttgaactcacagagaagtactttccttgggatggagtagtttcgaaacacactttctgtagaatctgcaagtggatatttggacctgtctgaggaattcgttgcaaacgggataatttcagctaagtaaacagaagcagtctcagaatcttcttgtgatgtttgcattcaaatcccagaattgaaccttcctttgaaagttcaggttggaaacactctttttgcaggatctacaagtggatattcggaccactctgtggacttcgttcgaaacgggtatatcttcacataacatctagacagaagcattctcagaaacttttctgtgatgactgcattcaactcacagagttgaacactccttttgagagtgcagttttgaaactctctttctctggaatctgcaaggggacatgcagacctctttgaaggtttcgttggaaacggaatcatcttcacataaaaattacacagaagcatcttcaggaactccttggtgatgtttgtattcaacttccagagttgaactttccttcggaaagagcagctatgaaacactctttttctagaatctgcaagtggacattgggagggctgtgaggtttgtggtggaaaaggaaatatctccacataaatactagatagaagccttctcagaaactactttcagatgattgcattcacctcacggagtggagcattcctattgacagagcagtttggaaacactcttgttgtagaatctgctagtggagatttggagcgctttgaggcctatggtagtaaagggaagagcttcacataaaatctagacagaagcattctcagaaaatactttgtgatgattgagtttaacacacagagctgaacattcctttggatggagcaggtttgaaacacactttctgtagaatctgcgagtggatatttggacctctctgaggatttcgttggaaacgggataactgcacctaactaaacggaagcattctcacaaaattcttcgtgaggtttgcattcaaatcccagagttgaaccttcctttgatagttcaggtttgaaacactctttttgtaggatctgcaagtggatatttggaccacactttggccttcgtgcgaaacgggtacatcttcaaataaaatctagacagaagccttctcagaaacttctctgtgatgattgcattcaactcaaagcgttgaaccctcctatggatagagcagtttcgaatctctctttttgtggaatctgcaagtggatatgtggtcctctttgaagatgtctttggaaacgggaatatcttcacataaaaactaaacagaagcattctcagaaacttctctgtgatgtttgtgtccaaatcacagagtttcacgttgcttttcatagagcagatgagaaacatgcttttcgtagggtctgcaagtggacatttggagagatttcaggcctgtggtggaaaacgaattatcgtcacgtaaaaactagagggaagcattgtcagaaacttgtttgtgatgactgcattcaactcacagagttgaaggttccttttcaaacagcagtttccaaacactctttctgtggcatctgcaagtggatgtttgggcctctttgaagatttcgttggaaacgggataatcttcacagaaaagctaaacagaagcatgctcagaaacttctttgtgatgtttgctttcaactcacagagttgaactttccttttgagagagaagctttgaaacactctttttctagaatctgcaagtggatatttggagggctttgaggcctgaggtggaacaggaattatcttcccgtaagaactagatagatgcattttcagaaactactttgtgacgattgcattcaagtcacagaggtgaacattccctttcagagagcactttggaaactctcgttgtgtagaatctgcaagtggagatatggaccgctttgaggcctatggtagtaaaggaaacagcttcatataaaaactagacagcagcattctcagaaaactctttgtgacgactgagttaaactcacagggctgaacattcctttggatggagcagtttggaaacacactatctgtaggatctgcaagcggatacttgggcctccctgaggatttcgtgggaaacgggataaaccgcacagaactaaacagaagcattctcagaaccttcttcgtgatgtttgcattcaacccacagtgttgaacctttctttgatagttcaggtttgaaacactctttttgtagaaactgcaagtggataactgcacttctttgaggcctatcgtagtaaaggaaataacttcctataaaaacaagacagaagctttctcagaaaattctctgggatgattgagttgaactcacagagcagtactttccttgggatggagtagtttcgaaacacactttctgtagaatctgcaagtggatatttggacctgtctgaggaattcgttgcaaacgggataatttcagctaagtaaacagaagcagtctcagaatcttcttgtgatgtttgcattcaaatcccagaattgaaccttcctttgaacgttcaggttggaaacactctttttgcagggtctacaagtggatattcggaccactctgtggacttcgttcgaaacgggtatatcttcacataacatctagacagaagcattctcagaaacttttctgtgatgactgcattcaactcacagagttgaacactccttttgagagcgcagttttgaaactctctttctctggaacctgcaaggggacatgcagacctctttgaaggtttcgttggaaacggaatcatcttcacataaaaattacacagaagcatcctcaggaactccttggtgatgtttgtattcaacttccagagttgaactttccttcggaaagagcagctatgaaacactctttttctagaatctgcaagtggacattgggagggctgtgaggtttgtggtggaaaaggaaatatctccacataaatactagatagaagccttctcagaaactactttgtgatgattgcattcacctcacggagtggagcattcctattgacagagcagtttggaaacactcttcttttagaatcggctagtggagatttggagcgctttgaggcctatggtagtaaagggaagagcttcacataaaatctagacagaagcattctcagaaaatactttgtgatgattgagtttaacacacagagctgaacattcctttggatggagaaggtttgaaacacactttctgtagaatctgcgagtggatatttggacctctctgaggatttcgttggaaacgggataactgcacctaactaaacggaagcattctcacaaaattctttgtgatgtttgcattcaaatcccagagttgaaccttcctttgatagttcagctttgaaacactctttttgtaggatctgcaagtggatatttggaccacactttggccttccttcgaaacgggtacatcttcaaataaaatctagacagaagccttctcagaaacttctctttgatgattgcattcaactcaaagcgttgaaacctcctatggatagagcagttttgaatctctttttttgtggaatctgcaagtggatatgtggtcctctttgaagatgtctttggaaacgggaatatcttcacataaaaactaaacagaagcattctcagaaacttctctgtgatgtttgtgttcaactcacagagtttcacgttgcttttcatagagcagatgagaaacatgcttttcgtagggtctgcaagtggacatttggagagctttcaggcctgtggtggaaaacgaattatcgtcacgtaaaaactagagagaagcattgtcagaaacttgtttgtgatgactgcattcaactcacagagttgaaggttccttttcaaacagcagtttccaaacactctttctgtggcatctgcaagtggatgtttgggcctctttgaagatttcgttggaaacgggataatcttcacagaaaagctaaacagaagcattctaagaaacttctttgtgatgtatgctttcaactcacagagttgaactttccttttgagagagaagctttgaaacactctttttctagaatctgcaagtggatatttggagggctttgaggccttaggtggaaaaggaattatcttcccgtaaggactagatagatgcattctcagaaactactttgtgaggattgcattcaagtcacagaggtgaacattccctttcagagagcactttggaaactctcgttgtgtagaatctgcaagtggagatatggaccgctttgaggcctatggtagtaaaggaaacagcttcatataaaaactagacagcagcattctcagaaaactctttgtgacgactgagtttaactcacagggctgaacattcctttggatggagcagtttggaaacacactatatgtaggatctgcaagcggatacttgggcctctctgaggattgcgttggaaacgggataaaccgcacagaactaaacagaagcattctcagaaccttcttcgtgatgtttgcattcaacccacagtgttgaacctttctttgatagttcgggtttgaaacactctttttgtagaaactgcaagtggataactgcacttctttgaggcctatcatagtaaaggaaataacttcctgtaaaaacaagacagaagctttctcagaaaattctctgggatgattgacttgaactcacagagcagtactttccttgggatggagtagtttcgaaacacactttctgtagaatctgcaagtggatatttggacctgtctgaggaattcgttgcaaacgggataatttcagctaagtaaacagaagcagtctcagaatcttcttgtgatgtttgcattgaaatcccagaattgaaccttcctttgaaagttcaggttggaaacactctttttgcaggatctacaagtggatattcggaccactctgtggacttcgttcgaaacgggtatatcttcacataacatctagacagaagcattctcagaaacttttctgtgatgactgcattcaactcacagagttgaacactccttttgagagcgcagttttgaaactctctttctctggaatctgcaaggggacatgcagacctctttgaaggtttcgttggaaacggaatcatcttcacataaaaattacacagaagcatcctcaggaactccttggtgatgtttgtattcaacttccagagttgaactttccttcggaaagagcagctatgaaacactctttttctagaatctgcaagtggacattgggagggctgtgaggtttgtggtggaaaaggaaatatctccacataaatactagttagaagccttctcagaaactactttgtgatgatcgcattcacctcacggagtggagcattcctattgacagagcagtttggaaacactcttcttgtagaatcggctagtggagatttggagcgctttgaggcctatggtagtaaagggaagagcttcacataaaatctagacagaagcattctcagaaaatactttgtgatgattgagtttaacacacagagctgaacattcctttggatggagaaggtttgaaacacactttctgtagaatctgcgagtggatatttggacctctctgaggatttcgttggaaacgggataactgcacctaactaaacggaagcattctcacaaaattctttgtgatgtttgcattcaaatcccagagttgaaccttcctttgatagttcagctttgaaacactctttttgtaggatctgcaggtggatatttggaccactctttggccttcgttcgaaatgggtacatcttcaaataaaatctagacagaagccttctcagaaacttctctgtgacgattgcattcaactcaaagcgttgaaccctcctatggatagagcagttttgaatctctctttttgtggaatctgcaagtggatatgtggtcctctttgaagatgtctttggaaacgggaatatcttcacataaaaactaaacagaagcattctcagaaacttctctgtgatgtttgtgttcaactcacagagtttcacgttgcttttcatagagcagatgagaaacatgcttttcgtagggtctgcaagtggacatttggagagatttcaggcctgtggtggaaaacgaattatcgtcacgtaaaaactagagggaagcattgtcagaaacttgtttgtgatgactgcattcaacccacagagttgaaggttccttttcaaacagcagtttccaaacactctttctgtggcatctgcaagtggatgtttgggcctctttgaagatttcgttggaaacgggataatcttcacagaaaagctaaacagaagcattctcagaaacttctttgtgatgtttgctttcaactcacagagttgaactttccttttgagagagaagctttgaaacactctttttctagaatctgcaagtggatatttggagggctttgaggcctgaggtggaaaaggaattatcttcccgtaagaaccagatagatgcattctgagaaactactttgtgacgattgcattcaagtcacagaggtgaacattccctttcacagagcactttggaaactctcgttgtgtagaatctgcaagtggagatatggaccgctttgaggcctatggtagtaaaggaaacagcttcatataaaaactagacagcagcattctcagaaaactctttgtgacgactgagtttaactcacagggctgaacattcctttggatggagcagtttggaaacacactatctgtaggatctgcaagcggatacttgggcctccctgaggatttcgttggaaacgggataaaccgcacagaactaaacagaagcattctcagaactttcttcgtgatgtttgcattcaacccacagtgttgaacctttctttgatagttcaggtttgaaacactctttttgtagaaactgcaagtggataactgcacttctttgaggcctatcgtagtaaaggaaataacttcctataaaaacaagacagaagctttctcagaaaattctctgggatgattgagttgaactcacagagcagtactttccttgggatggagtagtttcgaaacacagtttctgtagaatctgcaagtggatatttggacctgtctgaggaattcgttgcaaacgggataatttcagctaagtaaacagaagcagtctcagaatcttcttgtgatgtttgcattcaaatcccagaattgaaccttcctttgaaagttcaggttggaaacactctttttgcaggatctacaagtggatattcggaccactctgtggacttcattcgaaacgggtatatcttcacataacatctagacagaagcattctcagaaacttttctgtgatgactgcattcaactcacagagttgaacactccttttgagagcgcagttttgaaactctctttctctggaatctgcaaggggacatgcagacctctttgaaggtttcgttggaaacggaatcatcttcacataaaaattacacagaagcattctcaggaactccttggtgatgtttgtattcaacttccagagttgaactttccttcggaaagagcagctatgaaacactctttttctagaatctgcaagtggacattgggagagctgtgaggtttgtggtgtaaaaggaaatatctccacataaatactagatagaagccttctcagaaactactttgtgatgattgcattcacctcacggagtggagcattcctattgacagagcagtttggaaacactcttgttgtagaatctgctagtggagatttggagcgctttgaggcctatggtagtaaagggaagagcttcacataaaatctagacacaagcattctcagaaaatactttgtgatgattgagtttaacacacagagctgcacattcctttggatggagaaggtttgaaacacactttctgtagaatctgcgagtggatatttggacctctctgaggatttcgttggaaacgggataactgcacctaactaaacggaagcattctcacaaaattctttgtgatgtttgcattcaaatcccagagttgacccttcctttgatagttcagctttgaaacactctttttgtaggatctgcaagtggatatttggaccactctttggccttcgttcgaaacgggtacatcttcaaataaaatctagacagaagccttctcagaaacttctctgtgacgattgcattcaactcacagcgttgaaccctcctatggatagagcagttttgaatctctctttttgtggaatctgcaagtggatatgtggtcctctttgaagatgtctttggaaacgggaatatcttcaaataaaaactaaacagaagcattctcagaaacttctctgtgatgtttatgttcaactcacagagtttcacgttgcttttcatacagcagatgagaaacatggttttcgtagggtctgcaagtggacatttggagagatttcaggcctgtggtggaaaacgaattatcgtcacgtaaaaactagagagaagcattgtcagaaacttgtttgtgatgactgcattcaactcacagagttgaaggttccttttcaaacagcagtttccaaacactctttctgtggcatctgcaagtggatgtttgggcctctttgaagatttcgttggaaacgggatactcttcacagaaaagctaaacagaagcattctcagaaacttctttgtgatgtttgctttcaactcacagagttgaactttccttttgagagagaagctttgaaacactctttttctagaatctgcaagtggatatttggagggctttgaggcctgtggtggaaaaggaattatcttcccgtaagaactagatagatgcattctcacaaactactttgtgacgattgcattcaagtcacagaggtgaacattccctttcagagagcactttggaaactctagttgtgtagaatctgcaagtggagatatggacctctttgaggcctatggtagtaaaggaaacggcttcatataaaaactagacagcagcattctcagaaaactctttgtgacgactgagtttaactcacagggctgaacattcctttggatggagcagtttggaaacacactatctgtaggatctgcaagcagatacttgggcctctctgaggatttcgttggaaacgggataaaccgcacagaactaaacagaagcattctcagaaccttcttcgtgatgtttgcattcaacccacagtgttgaacctttctttgatagttcaggtttgaaacactctttttgtagaaactgcaagtggataactgcacttctttgaggcctatcgtagtaaaggaaataacttcctataaaaacaagacagaagctttctcagaaaattctctgggatgattgagttgaactcacagagcagtacttttccttgggatggagtagtttcgaaacacactttctgtagaatctgcaagtggatatttggacctgtctgaggaattcgttgcaaacgggataatttcagctaagtaaacagaagcagtctcagaatcttcttgtgatgtttgcattcaaatcccagaattgaaccttcctttgaaagttcaggttggaaacactctttttgcaggatctacaagtggatattcggaccactctgtggacttcgttcaaaacgggtatatcttcacataacatctagacagaagcattctcagaaacttttctgtgatgactgcattcaactcacagagttgaacactccttttgagagcgcagttttgaaactctctttctctggaatctgcaaggggacatgcagacctctttgaaggtttcgttggaaacggaatcatcttcacataaaaattacacagaagcattctcaggaactccttggggatgtttgtattcaacttccagagttgaactttccttcggaaagagcagctatgaaacactctttttctagaatctgcaagtggacattgggagggctgtgaggtttgtggtggaaaaggaaatatctccacataaatactagatagaagccttctcagaaactactttgtgatgattgcattcacctcacggagtggagcattcctattgacagagcagtttggaaacactcttcttgtagaatcggctagtggaggtttggagcgctttgaggcctatggcagtaaagggaagagcttcacatgaaatctagacagaagcattctcagaaaatactttgtgatgattgagtttaacacacagagctgaacattcctttggatggagaaggtttgaaacacactttctgtagaatctgcgagtggatatttggacctctctgaggatttcgttggaaacgggataactgcacctaactaaacggaagcattctcacaaaattctttgtgatgtttgcattcaaatcccagagttgaaccttcctttgatagttcagctttgaaacagtctttttgtaggatctgcaggtggatatttggaccactctttggccttcgttcgaaacgggtacatcttcaaataaaatctagacagaagccttctcagaaacttctctgtgacgattgcattcaactcaaagagttgaaccctcctatggatagagcagttttgaatctctctttttgtggaatctgcaagtggatatgtggtcctctttgaagatgtctttggaaacgggaatatcttcacataaaaactaaacagaagcattctcagaaacttctctgtgatgtttgtgttcacctcacagagtttcacgttgcttttcatagagcagatgagaaacatgcttttcgtagggtctgcaagtggacatttggagagatttcaggcctgtggtggaaaacgaattatcgtcacgtaaaaactagcgagaagcattgtcagaaacttgtttgtgatgactgctttcaactcacagagttgaaggttccttttcaaacagaagtttccaaacactctttctgtggcatctgcaagtggatgtttgggcctctttgaagatttcgttggaaacgggataatcttcacagaaaagctaaacagaagcattctcagaaacttctttgtgatgtttgctttcaactcacagagttgaactttccttttgagagagaagctttgaaacactctttttctagaatctgcaagtggatatttggagggctttgaggcctgtggtggaaaaggaattatcttcccgtaagaactagatagatgcattctcagaaactactttgtgacgattgcattcaagtcacagaggtgaacattccctttcacagagcactttggaaactctcgttgtgtagaatctgcaagtggagatatggaccgctttgaggcctatggtagtaaaggaaacagcttcatataaaaactagacagcagcattctcagaaaactctttgtgacgactgagtttaactcacagggctgaacattcctttggatggagcagtttggaaacacactatctgtaggatctgcaagcggatacttgggcctccctgaggatttcgttggaaacgggataaaccgcacagaactaaacagaagcattctcagaacttcttcgtgacgtttgcattcaacccacagtgttgaacctttctttgatagttcaggtttgaaacactctttttgtagaaactgcaagtggataactgcacttctttgaggcctatcgtagtaaaggaaataacttcctataaaaacaagacagaagctttctcagaaaattctctgggatgattgagttgaactcacagagcagtactttccttgggatggagtagtttcgaaacacactttctgtagaatctgcaagtggatatttggacctgtctgaggaattcgttgcaaacgggataatttcagctaagtaaacagaagcagtctcagaatcttcttgtgatgtttgcattcaaatcccagaatggaaccttcctttgaaagttcaggttggaaacactctttttgcaggatctacaagtggatattcggaccactctgtggacttcgttcgaaacgggtatatcttcacataacatctagacagaagcattctcagaaacttttctgtgatgactgcattcaactcacagagttgaacactccttttgagagcgcagttttgaaactctctttctctggaatctgcaaggggacatgcagacctctttgaaggtttcgttggaaacggaatcatcttcacataaaaattacacggaagcctcctcaggaactccttggtgatgtttgtattcaacttccagagttgaactttccttcggaaagagcagctatgaaacactctttttctagaatctgcaagtggacattgggagggctgtgaggtttgtggtggaaaaggaaatatctccacataaatactagatagaagccttctcagaaactactttgtgatgactgcattcacctcacggagtggagcattcctattgacagagcagtttggaaacactcttcttgtagaatcggctagtggagagttggagcgctttgaggcctatggtagtaaagggaagagcttcacataaaatctagacagaagcattctcagaaaatactttgtgatgattgagtttaacacacagagctgaacattcctttggatggagaaggtttgaaacacactttctgtagaatctgcgagtggatatttggacctctctgaggatttcgttggaaacgggataactgcacctaactaaacggaagcattctcacaaaattctttgtgatgtttgcattcaaatcccagagttgaaccttcctttgatagttcagctttgaaacactctttttgtaggttctgcaggtggatatttggaccactctttggccttcgttcgaaacgggtacatcttcaaataaaatctagacagaagccttctcagaaacttctctgtgacgattgcattcaacgcaaagcgttgaaccctcctatggatagagcagttttgaatctctctttttgtggaatctgcaagtggatatgtggtcctctttgaagatgtctttggaaacgggaatatcttcacattaaaactaaacagaagcattctcagaaacttctctgtgatgtttgtgttcaactcacagagtttcacgttgcttttcatagagcagatgagaaacatgcttttcgtagggtctgcaagtggacattcggagagatttcaggcctgtggtggaaaacgaattatcgtcacgtaaaaactagagagaagcattgtcagaaacttgtttgtgatgactgcattcaactcacagagttgaaggttccttttcaaacagcagtttccaaacactctttctgtggcatctgcaagtggatgtttgggcctctttgaagatttcgttggaaacgggataatcttcacagaaaagctaaacagaagcattctcagaaacttctttgtgatgtttgctttcaactcacagagttgaactttccttttgagagagaagctttgaaacactctttttctagaatctgcaagtggatatttggagggctttgaggcctgaggtggaaaaggaattatcttcccgtaagaactagatagatgcattctcagaaactactttgtgacgattgcattcaagtcacagaggtgaacattccctttcagagagcactttggaaaccctcgttgtgtagaatctgcaagtggagatatggactgctttggggcctatggtagtaaaggaaacagcttcatataaaaactagacagcagcattctcagaaaactctttgtgacgactgagtttaactcacagggctgaacattcctttggatggagcagtttggaaacacactatctgtaggatctgcaagcggatacttgggcctccctgaggatttcgttggaaacgggataaaccgcacagaactaaacagaagcattctcagaaccttcttcgtgacgtttgcattcaacccacagtgttgaacctttctttgatagttcaggtttgaaacactctttttgtagaaactgcaagtggataactgcacttctttgaggcctatcgtagtaaaggaaataacttcctataaaaacaagacagaagctttctcagaaaattctctgggatgattgagttgaactcacagagcagtactttccttgggatggagtagtttcgaaacacactttctgtagaatctgcaagtggatatttggacctgtctgaggaattcgttgcaaacgggataatttcagctaagtaaacagaagcagtctcagaatcttcttgtgatgtttgcattcaaatcccagaattgaaccttcctttgaaagttcaggttggaaacactctttttgcaggatctacaagtggatattcggaccactctgtggacttcgttcgaaacgggtatatcttcacataacatctagacagaagcattctcagaaacttttctgtgatgactgcattcaactcacagagttgaacactccttttgagagcgcagttttgaaactctctttctctggaatctgcaaggggacatgcagacctctttgaaggtttcgttggaaacggaatcatcttcacataaaaattacacagaagcatcctcaggaactccttggtgatgtttgtattcaacttccagagctgaactttccttcggaaagagcagctatgaaacactctttttctagaatctgcaagtggacattgggagggctgtgaggtttgtggtggaaaaggaaatatctccacataaatactagatagaagccttctcagaaactacgttgtgatgattgcattcaactcacggagtggagcattcctattgacagagcagtttggaaacactcttgttgtagaaactgctagtggatatttggagcgctttgaggcctatggtagtaaagggaagagcttcacataaaatcaagacagaagcattctcagaaaatactttgtgatgattgagtttaacacacagagctgaacattcctttggatggagaaggtttgaaacacactttctgtagaatctgcgagtggatatttggacctctctgaggatttcgttggaaacgggataactgcacctaactaaacggaagcattctcacaaaattctttgtgatgtttgcattcaaatcccagagttgaaccttcctttgatagtccagctttgaaacactctttttgtaggatctgcaggtggatatttggaccactctttggccttcgttcgaaacgggtacatcttcaaataaaatctagacagaagccttctcagaaacttctctgtgacgattgcattcaactcaaagagttgaaccctcctatggatagagcagttttgaatctctcttttcgtggaatctgcaagtggatatgtggtcctctttgaagatgtctttggaaacgggaatatcttcacataaaaactaaacagaagcattctcagaaacttctctgtgatgtttgtgttcaacacacagagtttcacattgcttttcatagagccgatgagaaacatgcttttcgtagggtctgcaagtggacatttggggagatttcaggcctgtggtggaaaacgaattatcgtcacgtaaaaactagagagaagcattgtcagaaacttgtttgtgatgactgcattcaactcacagagttgaaggttccttttcaaacagcagtttccaaacactctttctgtggcatctgcaagtggatgtttgggcctctttgaagatttcgttggaaacgggataatcttcacagaaaagctaaacagaagcattctcagaaacttctttgtgatgtttgctttcaactcacagagttgaactttccttttgagagagaagctttgaaacactctttttctagaatctgcaagtggatatttggagggctttgaggcctgtggtggaaaaggaattatcttcccgtaagaactagatagatgcattttcagaaactactttgtgacgattgcattcaagtcacagaggtgaacattccctttcagagagcactttggaaactctcgttgtgtagaatctgcaagtggagatatggaaccctttgaggcctatagtagtaaaggaaacagcttcatataaaaactagagagcagcattctcagaaaactctttgtgacgactgagtttaactcacagggctgaacattcctttggatggagcagtttggaaacacactatctgtaggatctgcaagcggatacttgggcctctctgaggatttcgttggaaacgggataaaccgcacagaactaaacagaagcattctcagaaccttcttcgtgatgtttgcattcaacccacagtgttgaacctttctttgatagttcaggtttggaacactctttttgtagaaactgcaagtggataactgcacttctttgaggcctatcgtagtaaaggaaataacttcctataaaaacaagacagaagctttctcagaaaattctctgggatgattgagttgaactcacagagcagtactttccttgggatggagtagtttcgaaacacactttctgtagaatctgcaagtggatatttggacctgtctgaggaattcgttgcaaacgggataatttcagctaagtaaacagaagcagtctcagaatcttcttgtgatgtttgcattcaaatcccagaattgaaccttcctttgaaagttcaggttggaaacactctttttgcaggatctacaagtggatattcggaccactctgtggacttcgttcgaaacgggtatatcttcacattacatctagacagaagcattctcagaaacttttctgtgatgactgcattcaactcacagagttgaacactccttttgagagcgcagttttgaaactctctttctctggaatctgcaaggggacatgcagacctctttgaaggtttcgttggaaacggaatcatcttcacataaaaattacacagaggcatcctcaggaactccttggtgatgtttgtattcaacttccagagttgaactttccttcggaaagagcagctatgaaacactctctttctagaatctgcaagtggacattgggagggctgtgaggtttgtggtggaaaaggaaatatctccacataaatactagatagaagccttctcagaaactactttgtgatgattgcattcacctcacggagttgagcatccctattgacagagcagtttggaaacactcttgttgtacaataggctagtggagatttggagcgctttgaggcctatggtagtaaagggaagagcttcacataaaatctagacagaagcattctcagaaaatactttgtgatgattgagtttaacacacagagctgaacattcctttggatggagaaggtttgaaacacactttctgtagaatctgcgagtggatatttggacctctctgaggatttcgttggaaacgggataactgcacctaactaaacggaagcattctcacaaaattctttgtgatgtttgcattcatatcccagagttgaaccttcctttgatagttcagctttgaaacactctttttgtaggatctgcaggtggatatttggaccactctttggccttcgttcgaaacgggtacatcttcaaataaaatctagacagaagccttctcagaaacttctctgtgacgattgcattcaactcaaagcgttgaaccctcctatggatagagcagttttgaatctctctttttgtggaatctgcaagtggatatgtggtcctctttgaagatgtctttggaaacgggaatatcttcacataaaaactaaacagaagcattctcagaaacttctctgtgatgtttgtgttcaactcacagagtttcacgttgcttttcatagagcagatgagaaacatgcttttcgtagggtctgcaagtggacatttggagagctttcaggcctgtggtggaaaacgaattatcgtcacgtaaaaactagagagaagcattgtcagaaacttgtttgtgatgactgcattcaactcacagagttgaaggttccttttcaaacagcagtttccaaacactctttctgtggcatctgcaagtggatgtttgggcctctttgaagatttcgttggaaacgggataatcttcacagaaaagttaaacagaagcatgctcagaaacttctttgtgatgtttgctttcaactcacagagttgaactttccttttgagagagaagctttgaaacactctttttctagaatctgcaagtggatatttggagggctttgaggcctgaggtggaacaggaattatcttcccgtaagaactagatagatgcattctcagaaactactttgtgacgattgcattcaagtcacagaggtgaacattccctttcagagagcactttggaaactctcgttgtgtagaatctgcaagtggagatatggaccgctttgaggcctatggtagtaaaggaaacagcttcatataaaaactagacagcagcattctcagaaaactctttgtgacgactgagtttaactcacagggctgaacattcctttggatggagcagtttggaaacacactatctgtaggatctgcaagcggatacttgggcctccctgaggatttcgttggaaacgggatacaccgcacagaactaaacagaagcattctcagaaccttcttcgtgatgtttgcattcaacccacagtgttgaacctttctttgatagttcaggtttgaaacactctttttgtagaaactgcaagtggataactgcacttctttgaggcctatcgtagtaaaggaaataacttcctataaaaacaagacagaagctttctcagaaaattctctgggatgattgagttgaactcacagggcagtactttccttgggatggagtaatttcgaaacacattttctgtagaatctgcaagtggatatttggacctgtctgaggaattcgttgcaaacgggataatttcagctacgtaaacagaagcagtctcagaatcttcttgtgatgtttgcattcaaatcccagaattgaaccttcctttgaaagttcaggttggaaacactctttttgcaggatctacaagtggatattcggaccactctgtggacttcgttcgaaacgggtatatcttcacataacatctagacagaagcattctcagaaacttttctgtgatgactgcattcaactcacagagttgaacactccttttgagagcgcagttttgaaactctctttctctggaatctgcaaggggacatgcagacctctttgaaggtttcgttggaaacggaatcatcttcacataaaaattacacagaagcatcctcaggaactccttggtgatgtttgtattcaacttccagagttgaactttccttcggaaagagcagctatgaaacactctttttctagaatctgcaagtggacattgggagggctgtgaggtttgtggtggaaaaggaaatatctccacataaatactagatagaagccttctcagaaactactttgtgatgattgcattcacctcacggattggagcattcctattgacagagcagtttggaaacactcttctcgtagaatcggctagtggagatttggagcgctttgaggcctatggtagtaaagggaagagcttcacataaaatctagacagaagcattctcagaaaatactttgtgatgattgagtttaacacacagagctgaacattcctttggatggagaaggtttgaaacacactttctgtagaatctgcgagtggatatttggacctctctgaggatttcgttggaaacgggataactgcacctaactaaacggaagcattctcacaaaattctttgtgatgtttgcattcaaatcccatagttgaaccttcctttgatagttcaggtttgaaacactctttttgtaggatctgcaggtggatatttggacaactctttggccttcgttcgaaacgggtacatcttcaaataaaatctagacagaagccttctcagaaacttctctgtgacgattgcattcaactcaaagagttgaaccctcctatggatagagcagttttgaatctctctttttgtggaatctgcaagtggatatgtggtcctctttgaagatgtctttggaaacgggaatatcttcacataaaaactaaacagaagcattctcagaaacttctctgtgatgtttgtgttcaactcacagagtttcacgttgcttttcatagagcagatgagaaacatgcttttcgtagggtctgcaagtggacatttggagagatttcaggcctgtggtggaaaacgaattatcgtcacgtaaaaactagagagaagcattgtcagaaacttgtttgtgatgactgcattcaactcacagagttgaaggttccttttcaaacagcagtttccaaacactctttctgtggcatctgcaagtggatgtttgggcctctttgaagatttcgttggaaacgggataatcttcacagaaaagctaaacagaagcattctcagaaacttctttgtcatgtttgctttcaactcacagagttgaactttccttttgagagagaagctttgaaacactctttttctagaatccgcaagtggatatttggagggctttgaggcctgaggtggaaaaggaattatcttcccgtaagaactagatagatgcattctcagaaactactttgtgacgattgcattcaagtcacagaggtgaacattccctttcagagagcactttggaaactctcgttgtgtagaatctgcaagtggagatatggaccgctttgaggcctatggtagtaaaggaaacagcttcatataaaaactagacaacagcattctcagaaaactctttgtgacgactgagtttaactcacagggctgaacattcctttggatggagcagtttggaaacacactatctgtaggatctgcaagcggatacttgggcctcgctgaggatttcgttggaaacaggataaaccgcacagaactaaacagaagcattctcagaaccttcttcgtgatgtttgcattcaacccacagtgttgaacctttctttgatagttcaggtttgaaacactctttttgtagaaactgcaagtggataactgcacttctttgaggcctatcgtagtaaaggaaataacttcctataaaaacaagacagaagctttctcagaaaattctctgggatgattgagttgaactcacagagcactactttccttgggatggagtagtttcgaaacacactttctgtagaatctgcaagtggatatttggacctgtctgaggaattcgttgcaaacgggataatttcagctaagtaaacagaagcagtctcagaatcttcctgtgatgtttgcattcaaatcccagaattgaaccttcctttgaaagctcaggttggaaacactctttttgcaggatctacaagtggatattcggaccactctgtggacttcgttcgaaacgggtatatcttcacataacatctagacagaagcattctcagaaacttttctgtgatgactgcattcaactcacagagttgaacactccttttgagagcgcagttttgaaactctctttctctggaatctgcaaggggacatgcagacctctttgaaggtttcgttggaaacggaatcatcttcacataaaaattacacagaagcattctcaggaactccttggtgatgtttgtattcaacttccagagttgaactttccttcggaaagagcagctatgaaacactctttttctagaatctgcaagtggacattgggagggctgtgaggtttgtggtggaaaaggaaatatctccacataaatactagatagaagccttctcagaaactactttgtgatgattgcattcacctcacggagtggagcattcctattgacagagcagtttggatacactcttcttgtagaatcggctagcggagatttggagcgctttgaggcctatggtagtaaagggaagagcttcacataaaatctagacagaagcattctcagaaaatactttgtgatgattgagtttaacacacagagctgaacattcctttggatggagaaggtttgaaacacactttctgtagaatctgcgagtggatatttggacctctctgaggatttcgttggaaacgggataactgcacctaactaaacggaagcattctcacaaaattcttcgtgaggtttgcattcaaatcccagagttgaaccttcctttgagagttcagctttgaaacactctttttgtaggatctgcaggtggatatttggaccactctttggccttcgttcgaaacgggtacatcttcaaataaaatctagacagaagccttctcagaaacttctctgtgacgattgcattcaactcaaagcgttgaaccctcctatggatagagcagttttgaatctctctttttgtggaatctgcaactggatatgtggtcctctttgaagatgtctttggaaacgggaatatcttcacataaaaactaaacagaagcattctcagaaacttctctgtgatgtttgtgttcaactcacagagtttcacgttgcttttcatagagcagatgagaaacatgcttttcgtagggtctgcaagtggacatttggagagctttcaggcctgtggtggaaaacgaattatcgtcacgtaaaaactagagagaagcattgtcagaaacttgtttgtgatgactgcattcaactcacagagttgaaggttccttttcaaacagcagtttccaaacactctttctgtggcatctgcaagtggatgtttgggcctctttgaagatttcgttggaaacgggataatcttcacagaaaagctaaacagaaacattctcagaaacttcttttgatgtttgctttcaactcacagagttgaactttccttttgagagagaagctttgaaacactctttttctagaatctgcaagtggatatttggagggctttgaggcctgtggtggaaaaggaattatcttcccgtaagaactagatagatgcattctcagaaactactttgtgacgattgcattcaagtcacagaggtgaacattccctttcagagagcactttggaaacccccgttctgtagaatctgcaagtggagatatggaccgctttgaggcctatggtagtaaaggaaacagcttcatataaaaactagacagcagcattctcagaaaactctttgtgacgactgagtttaactcacagggctgaacattcctttggatggagcagtttggaaacacactatctgtaggatctgcaagcggatacttgggcctccctgaggatttcgttggaaacgggataaaccgcacagaactaaacagaagcattctcagaaccttcttcgtgatgtttgcattcaacccacagtgttgaaactttctttgatagttcaggtttgaaacactctttttgtagaaacttcaagtggataactgcacttctttgaggcctatcatagtaaaggaaataacttcctataaaaacaagacagaagctttctcagaaaattctctgggatgattgagttgaactcacagagcagtactttctttgggatggagtagtttcgaaacacactttctgtacaatctgcaagtggatatttggacctgtctgaggaattcgttgcaaacgggataatttcagctaagtaaacagaagcagtctcagaatcttcttgtgatgtttgcattcaaatcccagaattgaaccttcctttgaaagttcaggttggaaacactctttttgcaggatctacaagtggatattcggaccactctgtggacttcattcgaaacggctatatcttcacataacatctagacagaagcattctcagaaacttttctgtgatgactgcattcaactcacagagttgaacactccttttgagagcgcagttttgaaactctctttctctggaatctgcaaggggacatgcagacctctttgaaggtttcgttggaaacggaatcatcttcacataaaaattacacagaagcatcctcaggaactccttggtgatgtttgtattcaacttccagagttgaactttccttcggaaagagcagctatgaaacactctttttctagaatctgccagtggacattgggagggctgtgaggtttgtggtggaaaaggaaatatctccacataaatactagatagaagccttctcagaaactactttgtgatgattgcattcacctcacggagtggagcattcctattgacagagcagtttggaaacactcttgttgtagaatctcctagtggagatttggagcgctttgaggcctacggtagtaaagggaagagcttcacataaaatctagacagaagcattctcagaaaatactttgtgatgattgagtttaacacacagagctgaacattcctttggatggagcaggtttgaaacacactttctgtagaatctgcgagtggatatttggacctctctgaggatttcgttggaaacgggataactgcacctaactaaacggaagcattctcacaaaattctttgtgatgtttgcattcaaatcccagagttgaaccttcctttgatagttcagctttgaaacactctttttgtaggatctgctggtggatatttggaccactctttggccttcgttcgaaacgggtacatcttcaaataaaatctagacagaagccttctcagaaacttctctgtgacgattgcattcaactcaaagagttgaaccctcctatggatagagcagttttgaatctctctttttgtggaatctgcaagtggatatgtggtcctctttgaagatgtctttggaaacaggaatatcttcacataaaaactaaacagaagcattctcagaaacttctctgtgatgtttgtgttcaactcacagagtttcacgttgcttttcatagagcagatgagaaacatgcttttcgtagggtctgcaagtggacatttggagagatttcaggcctgtggtggaaaacgaattatcgtcacgtaaaaactagagagaagcattgtcagaaacttgtttgtgatgactgcattcaactcacagagttgaaggttccttttcaaacagcagtttccaaacactctttctgtggcatctgcaagtggatgtttgggcctctttgaagatttcgttggaaacgggatactcttcacagaaaagctaaacagaagcattctcagaaacttctttgagatgtttgctttcaactcacagagttgaactttccttttgagagagaagctttgaaacactctttttctagaatctgcaagtggatatttggagggctttgaggcctgtggtggaaaaggaattaacttcccgtaagaactagatagatgcattctcagaaactactttgtgacgattgcattcaagtcccagaggtgaacattccctttcagagagcactttggaaactctcgttgtgtagaatctgcaagtggagatatggaccgctttgaggcctatggtagtaaaggaaacagcttcatataaaaactagacagcagcattctcagaaaactctttgtgacgactgagtttaactcacagggctgaacattcctttggatggagcagtttggaaacacactatctgtaggatctgcaagcggatacttgggcctctctgaggatttcgttggaaacgggataaaccgcacagaactaaacagaagcattctcagaactttcttcgtgatgtttgcattcaacccacagtgttgaacctttctttgatagttcaggtttgaaacactctttttgtagaaactgcaagtggataactggacttctttgaggcctatcgtagtaaaggaaataacttcctataaaaacaagacagaagctttctcaaaaaattctctgggatgattgagttgaactcacagagcagtactttccttgggatggagtagtttcgaaacacactttctgtagaatctgcaagtggatatttggacctgtctgaggaattcgttgcaaacgggataatttcagctaagtaaacagaagcagtctcagaatcttcttgtgatgtttgcattcaaatcccagaattgaaccttcctttgaaagttcaggttggaaacactctttttgcaggatctacaagtggatattcggaccactctgtggacttcgttcgaaacgggtatatcttcacataacatctagacagaagcattctcagaaacttttctgtgatgactgcattcaactcacagagttgaacactccttttgagagcgcagttttgaaactctctttctctggaatctgcaaggggacatgcagacctctttgaaggtttcgttggaaacggaatcatcttcacataaaaattacacagaagcatcctcaggaactccttggtgatgtttgtattcaacttccagaggtgaactttccttcggaaagagcagctatgaaacactctttttctagaatctgcaagtggacattgggagggctgtgaggtttgtggtggaaaaggaaatatctccacataagtactagatagaagccttctcagaaactactttgtgatgattgcattcacctcacggagtggagcattcctattgacagagcagtttggaaacactcttcttgtagaatcggctagtggagatttggagcgctttgaggcctatggtagtaaagggaagagcttcacataaaatctagacagaagcattctcagaaaatactttgtgatgattgagtttaacacacagagctgaacattcctttggatggagaaggttggaaccacactttctgtagaatctgcgagtggatatttggacctctctgaggatttcgttggaaacgggataactgcacctaactaaacggaagcattctcacaaaattctttgtgatatttgcattcaaatcccagagttgaaccttcctttgatagttcagctttggaacactctttttgtaggatctgcaggtggatatttggaccactctttggccttcgttcaaaacgggtacatcttcaaataaaatctagacagaagccttctcagaaacttctctgtgacgattgcattcaactcaaagcgttgaaccctcctatggatagagcagttttgaatctctctttttgtggaatctgcaagtggatatgtggtcctctttgaagatgtctttggaaacgggaatatcttcacataaaaactaaacagaagcattctcagaaacttctctgtgatgtttgtgttcaactcacagagtttcatgttgcttttcatagagcagatgagaaacatgcttttcgtagggtctgcaagtggacatttggagagatttcaggcctgtggtggaaaacgaattatcgtcacgtaaaaactagagagaagcattgtcagaaacttgtttgtgatgactgcattcaactcacagagttgaaggttccttttcaaacagcagtttccaaacactctttctgtggcatctgcaagtggatgtttgggcctctttgaagatttcgttggaaacgggataatcttcacagaaaagctaaacagaagcattctcagaaacttctttgtgatgtttgctttcaactcacagagttgaactttccttttgagagagaagctttgaaccactctttttctagaatctgcaagtggatatttggagggctttgaggcctgaggtggaaaaggaattatcttcccgtaagaactagatagatgcattctcagaaactactttgtgacgaatgcattcaagtcacagaggtgaacattccctttcagagagcactttggaaactctcgttgtgtagaatctgcaagtggagatatggaccgctttgaggcctatggtagtaaaggaaacagcttcatataaaaactagacagcagcattctcagaaaactctttgtgacgactgagtttaactcacagggctgaacattcctttggatggagcagtttggaaacacactatctgtaggatctgcaagcggatacttgggcctccctgaggatttcgttggaaacgggataaaccgcacagaactaaacagaagcattctcagaaccttcttcgtgatgtttgcattcaacccacagtgttgaaactttctttgatagttcaggtttgaaacactctttttgtagaaacttcaagtggataactgcacttctttgaggcctatcgtagtaaaggaaataacttcctataaaaacaagacagaagctttctcagaaaattctctgggatgattgagttgaactcacagagcagtactttctttgggatggagtagtttcgaaacacactttctgtacaatctgcaagtggatatttggacctgtctgaggaattcgttgcaaacgggataatttcagctaagtaaacagaagcagtctcagaatcttcttgtgatgtttgcattcaaatcccagaattgaaccttcctttgaacgttcaggttggaaacactctttttgcaggatctacaagtggatattcggaccactctgtggacttcgatcgaaacgggtatatcttcacataacatctagacagaagcattctcagaaacttttctgtgatgactgcattcaactcacagagttgaacactccttttgagagcgcagttttgaaactctctttctctggaatctgcaaggggacatgcagacctctttgaaggtttcgttggaaacggaatcatcttcacataaaaattacacagaggcatcctcaggaactctttggtgatgtttgtattcaacttccagagttgaactttccttcggaaagagcagctatgaaacactctctttctagaatctgcaagtggacattgggagggctgtgaggtttgtggtggaaaaggaaatatctccacataaatactagatagaagccttctcagaaactactttgtgatgattgcattcacctcacggagttgagcatccctattgacagagcagtttggaaacactcttgttgtagaataggctagtggagatttggagcgctttgaggcctatggtagtaaagggaagagcttcacataaaatctagacagaagcattctcagaaaatactttgtgatgattgagtttaacacacagagctgaacattcctttggatggagaaggtttgaaacacactttctgtagaatctgcgagtggatatttggacctctctgaggatttcgttggaaacgggataactgcacctaactaaacggaagcattctcacaaaattctttgtgatgtttgcattcaaatcccagagttgaaccttcctttgatagttcagttttgaaacactctttttgtaggatctacaggtggatatttggaccactctttggccttcgttcgaaaagggtacatcttcaaataaaatctagacagaagccttctcagaaacttctctgtgacgattgcattcaactcaaagcgttgaaccctcctatggatagagcagttttgaatctctctttttgtggaatctgcaagtggatatgtggtcctctttgaagatgtctttggaaacgggaatatcttcacataaaaactaaacagaagcattctcagaaacttctctgtgatgtttgtgttcaactcacagagtttcacgttgcttttcatagagcagatgagaaacatgcttttcgtagggtctgcaagtggacatttggagagatttcaggcctgtggtggaaaacgaattatcgtcacgtaaaaactagagagaagcattgtcagaaacttgtttgtgatgactgcattcaactcacagagttgaaggttccttttcaaacagcagtttccaaacactctttctgtggcatctgcaagtggatgtttgggcctctttgaagatttcgttggaaacgggataatcttcacagaaaagctaaacagaagcattctcagaaacttctttgtgatgtttgctttcaactcacagagttgaactttccttttgagagagaagctttgaaacactctttttctagaatctgcaagtggatatttggagggctttgaggcctgaggtggaaaaggaattatcttcccgtaagaactagatagatgcattctcagaaactactttgtgacgattgcattcaagtcacagaggtgaacattccctttcacagagcactttggaaactctcgttgtgtagaatctgcaagtggagatatggaccgctttgaggcctatggtagtaaaggaaacagcttcatataaaaactagacagcagcattctcagaaaactctttgtgacgactgagtttaactcacagggctgaacattcctttggatggagcagtttggaaacacactatctgtaggatctgcaagcggatacttgggcctctctgaggatttcgttggaaacgggataaaccgcacagaactaaacagaagcattctcagaaccttcttcgtggcgtttgcattcaacacacagtgttgaacctttctttgatagttcaggtttgaaacactctttttgtagaaactgcaagtggataactgcacttctttgaggcctatcgtagtaaaggaaataacttcctataaaaacaagacagaagctttctcagaaaattctctgggatgattgagttgaactcacagagcagtactttccttgggatggaggagtttcgaaacacactttctgtacaatctgcaagtggatatttggacctgtctgaggaattcgttgcaaacgggataatttcagctaagtaaacagaagcagtctcagaatcttcttgtgatgtttgcattcaaatcccagaattgaaccttcctttgagagttcaggttggaaacactctttttgcaggatctacaagtggatattcggaccactctgtggacttcgttcgaaacgggtatatcttcacataacatctagacagaagcattctcagaaacttttctgtgatgactgcattcaactcacagagttgaacactccttttgagagcgcagttttgaaactctctttctctggaatctgcaaggggacatgcagacctctttgaaggtttcattggaaacagaatcatcttcacataaaaattacacagaagcattctcaggaactccttggtgatgtttgtattcaacttccagagttgaactttccttcggaaagagcagctatgaaacactccttttctagaatctgcaagtggacattgggagggctgtgaggtttgtggtggaaaaggaaatatctccacgtaaatactagatataagccttctcagaaactactttgtgatgattgcattcacctcacggagtggagcattcctattgacagagcagtttggaaacactcttgttgtagaatcggctagtggagatttggagcgctttgaggcctatggtagtaaagggaagagcttcacataaaatctagacagaagcattctcagaaaatactttgtgatgattgagtttaacacacagagctgaacattcctttggatggagaaggtttgaaacacactttctgtagaatctgcgagtggatatttggacctctctgaggatttcgttggaaacgggataactgcacctaactaaacggaagcattctcacaaaattctttgtgatgtttgctttcaaatcccagagttgaaccttcctttgatagttcagctttgaaacactctttttgtaggatctgctggtggatatttggaccactctttggccttcattcgaaacgggtacatcttcaaataaaatctagacagaagccttctcagaaacttctctgtgacgattgcattcaactcaaagcgttgaaccctcctatggatagagcagttttgaatctctctttttgtggaatctgcaagtggatatgtggtcctctttgaagatgtctttggaaacgggaatatcttcacataaaaactaaacagaagcattctcagaaacttctctgtgatgtttgtgttcaactcacagagtttcacgttgcttttcatagagcagatgagaaacatgcttttcgtagggtctgcaagtggacatttggagagatttccggcctgtggtggaaaacgaattatcgtcacgtaaaaactagagagaagcattgtcagaaacttgtttgtgatgactgcattcaactcacagagttgaaggttccttttcaaacagcagtttccaaacactctttctgtggcatctgcaagtggatgtttgggcctctttgaagatttcgttggaaacgggataatcttcacagaaaagctaaacagaagcattctcagaaacttctttgtgatgtttgctttcaactcacagagttgaactttccttttgagagagaagctttgaaacactctttttctagaatctgcaagtggatatttggagggctttgaggcctgtggtggaaaaggaattatcttcccgtaagaactagatagatgcattctcagaaactactttgtgacgattgcattcaagtcacagaggtgaacattccctttcagagagcactttggaaactctcgttgtgtagaatctgcaagtggagatatggaccgctttgaggcctatggtagtaaaggaaacagcttcatataaaaactagacagcagcattctcagaaaactctttgtgacgactgagttaaactcacagggctgaacattcctttggatggagcagtttggaaacacactatctgtaggatctgcaagcggatacttgggcctccctgaggatttcgtgggaaacgggataaaccgcacagaactaaacagaagcattctcagaaccttcttcgtgatgtttgcattcaacccacagtgttgaacctttctttgatagttcaggtttgaaacactctttttgtagaaactgcaagtggataactgcacttctttgaggcctatcgtaataaaggaaataacttcctataaaaacaagacagaagctttctcagaaaattctctgggatgattgagttgaactcacagagcagtactttccttgggatggagtagtttcgaaacacactttctgtagaatctgcaagtggatatttggacctgtctgaggaattcgttgcaaacgggataatttcagctaagtaaacagaagcagtctcagaatcttcttgtgatgtttgcattcaaatcccagaattgaaccttcctttgaaagttcaggtttgaaacactctttttgcaggatctacaagtggatattcggaccactctgtggacttcgttcgaaacgggtatatcttcacataacatctacacagaagcattctcagaaacttttctgtgatgactgcattcaactcacagagttgaacactccttttgagagcgcagttttgaaactctctttctctggaatctgcaaggggacatgcagacctctttgaaggtttcgttggaaacggaatcatcttcacataaaaattacacagaagcatcctcaggaactccttggtgatgtttgtattcaacttccagagttgaactttccttcggaaagagcagctatgaaacactctttttctagaatctgcaagtggacattgggagggctgtgaggtttgtggtggaaaaggaaatatctccacataaatactagatagaagccttctcagaaactactttgtgatgattgcattcacctcacggagtggagcattcctattgacagagcagtttggaaacactcttgttgtagaatcggctagtggagatttggagcgctttgaggcctatggtagtaaagggaagagcttcacataaaatctagacagaagcattctcagaaaatactttgtgatgattgagtttaacacacagagctgaacattcctttggatggagaaggtttgaaacacactttctgtagaatctgcgagtggatatttggacctctctgaggatttcgttggaaacgggataactgcacctaactaaacggaagcattctcacaaaattctgtgtgatgtttgcattcaaatcccagagttgaactttcctttgatagttcagctttgaaacactctttttgtaggttctgcaggtggatatttggaccactctttggccttcgttcgaaacgggtacatcttcaaataaaatctagacagaagccttctcagaaacttctctgtgacgattgcattcaactcaaagcgttgaaacctcctatggatagagcagttttgaatctctctttttgtggaatctgcaagtggatatgtggtcctctttgaagatgtctttggaaacgggaatatcttcacattaaaactaaacagaagcattctcagaaacttctctgtgatgtttgtgttcaactcacagagtttcacgttgcttttcatagagcagatgagaaacatgcttttcgtagtgtctgcaagtggacatttggagagctttcaggcctgtggtggaaaacgaattatcgtcacgtaaaaactagagagaagcattgtcagaaacttgtttgtgatgactgcattcaactcacagagttgaaggttccttttcaaacagcagtttccaaacactctttctgaggcatctgcaagtggatgtttgggcctctttgaagatttcgttggaaactggataatcttcacagaaaagctaaacagaagcattctcagaaacttctttgtgatgtttgctttcaactcacagagttgaactttccttttgagagagaagctttgaaacactctttttctagaatctgcaagtggatatttggagggctttgaggcctgaggtggaaaaggaattatcttcccgtaagaactagatagatgcattctcagaaactactttgtgacgattgcattcaagtcacagaggtgaacattccctttcacagagcactttggaaactctcgttgtgtagaatctgcaagtggagatatggaccgctttgaggcctatggtagtaaaggaaacagcttcatataaaaactagacagcagcattctcagaaaacactttgggacgactgagtttaactcacagggctgaacattcctttggatggagcagtttggaaacacactatctgtaggatctgcaagcggatacttgggcctccctgaggatttcgttggaaacgggataaaccgcacaaaactaaacagaagcattctcagaaccttcttcgtgatgtttgcattcaacccacagtgttgaacctttctttgatagttcaggtttgaaacactctttttgtagaaactgcaagtggataactgcacttctttgaggcctatcgtagtaaaggaaataacttcctataaaaacaagacagaagctttctcagaaaattctctgggatgattgagttgatctcacagagcagtactttccttgggatggagtagtttcgaaacacactttctgtagaatctgcaagtggatatttggacctgtctgaggaattcgttgcaaacgggataatttcagctaagtaaacagaagcagtctcagaatcttcttgtgatgtttgcattcaaatcccagaattgaaccttcctttgaaagttcaggttggaaacactctttttgcaggatctacaagtggatattcggaccactctgtggacttcgttcgaaacgggtatatcttcacataacatctagacagaagcattctcagaaacttttctgtgatgactgcattcaactcacagagttgaacactccttttgagagcgcagttttgaaactctctttctctggaatctgcaaggggacatgcagacctctttgaaggtttcgttggaaacggaatcatcttcacataaaaattacacagaagcatcctcaggaactccttggtgatgtttgtattcaacttccagagttgaactttccttcggaaagaacagctatgaaacactctttttctagaatttgcaagtggacattgggagggctgtgaggtttgtggtggaaaaggaaatatctccacataaatactagatagaagccttctcagaaactactttgtgatgatttcattcacctcacggagtggagcattcgtattgacagagcagtttggaaacactcttgttgtagaatctcctagtggagatttggagcgctttgaggcctatggtagtaaagggaagagcttcacataaaatctagacagaagcattctcagaaaatactttgtgatgattgagtttaacacacagagctgaacattcctttggatggagaaggtttgaaacacactttctgtagaatctgcgagtggatatttggacctctctgaggatttcgttggaaacgggataactgcacctaactaaacggaagcattctcacaaaattctttgtgatgtttgcattcaaatcccagagttgaaccttcctttgatagttcaggtttgaaacactctttttgtaggatctgcaggtggatatttcgaccactctttggccttcgttcgaaacgggtacatcttcaaataaaatctagacagaagccttctcagaaacttctctgtgacgattgcattcaactcaaagagttgaaccctcctatggatagagcagttttgaatctctctttttgtggaatctgcaagtggatatgtggtcctctttgaagatgtctttggaaacgggaatatcttcacataaaaactaaacagaagcattctcagaaacttctctgtgatgtttgtgttcaactcacagagtttcacgttgcttttcatagagcagatgagaaacatgcttttcgtagggtctgcaagtggacatttggagagatttcaggcctgtggtggaaaacgaattatcgtcacgtaaaaactagagagaggcattgtcagaaacttgtttgtgatgactgcattcaactcacagagttgaaggttccttttcaaacagcagtttccaaacactctttctgtggcatctgcaagtggatgtttgggcctctttgaagatttcgttggaaacgggatactcttcacagaaaagctaaacagaagcattctcagaaacttctttgtgatgtttgctttcaactcacagagttgaactttccttttgagagagaagctttgaaacactctttttctagaatctgcaagtggatatttggagggctttgaggcctgaggtggaaaaggaattatcttcccgtaagaactagatagatgcattctcagaaactactttgtgacgattgcattcaagtcacagaggtgaacattccctttcacagagcactttggaaactctcgttgtgtagaatctgcaagtggagatatggaccgctttgaggcctatggtagtaaaggaaagagcttcatataaaaactagacagcagcattctcagaaaactctttgtgacgactgagtttaactcacagggctgaacattcctttggatggagcagtttggaaacacactatctgtaggatctgcaagcggatacttgggcctctctgaggatttcgttggaaacgggataaaccgcacagaactaaacagaagcattctcagaaccttcttcgtgatgtttgcattcaacccacagtgttgaacctttctttgatagttcaggtttgaaacactctttttgtagaaactgcaagtggataactgcacttctttgaggcctatcgtagtaaaggaaataacttcctataaaaacaagacagaagctttctcagaaaattctctgggatgattgagttgaactcacagagcagtactttccttgggatggagtagtttcaaaacacactttctgtagaatctgcaagtggatatttggacctgtatgaggaattcgttgcaaacaggataatttcagctaagtaaacagaagcagtctcagaatcttcttgtgatgtttgcattcaaatcccagaattgaaccttcctttgaaagttcaggttggaaacactctttttgcaggatctacaagtggatattcggaccactctgtggacttcgttcgaaacgggtatatcttcacataacatctagacagaagcattctcacaaacttttctgtgatgactgcattcaactcacagagttgaacactccttttgagagcgcagtttggaaactctctttctctggaatctgcaaggagacatgcagtcctctttgaaggtttcgttggaaacggaatcatcttcacataaaaattacacagaagcatcctcaggaactccttggtgatgtttgtattcaacttccagagttgaactttccttcggaaagagcagctatgaaacactctttttctagaatctgcaagtggacattgggagggctgtgaggtttgtggtggaaaaggaaatatctccacataaatactagatagaagccttctcagaaactactttgtgatgattgcattcacctcacggagtggagcattcctattgacagagcagtttggaaacactcttgttgtagaatctgctagtggagatttggagcgctttgaggcctatggtagtaaagggaagagcttcacataaaatctagacacaagcattctcagaaaatactttgtgatgattgagtttaacacacagagctgcacattcctttggatggagaaggtttgaaacacactttctgtagaatctgcgagtggatatttggaactctctgaggatttcgttggaaacgggataactgcacctaactaaacggaagcattctcacaaaattctttgtgatgtttgcattcaaatcccagagttgacccttcctttgatagttcagctttgaaacactctttttgtaggatctgcaagtggatatttggaccactctttggccttcgttcgaaacgggtacatattcaaataaaatctagacagaagccttctcagaaacttctctgtgacgattgcattcaactcacagcgttgaaccctcctatggatagagcagttttgaatctctctttttgtggaatctgcaagtggatatgtggtcctctttgaagatgtctttggaaacgggaatatcttcacataaaaactaaacagaagcattctcagaaacttctctgtgatgtttgtgttcaactcacagagtttcacgttgcttttcatagagcagatgagaaacatgcttttcgtagggtctgcaagtggacatttggagagatttcaggcctgtggtggaaaacgaattatcgtcacgtaaaaactagagagaagcattgtcagaaacttgtttgtgatgactgcattcaactcacagagttgaaggttccttttcaaacagcagtttccaaacactctttctgtggcatctgcaagtggatgtttgggcctctttgaagatttcgttggaaacgggataatcttcacagaaaagctaaacagaagcattctcagaaacttctttgtgatgtttgctttcaactcacagagttgaactttccttttgagagagaagctttgaaacactctttttctagaatctgcaagtggatatttggagggctttgaggcctgtggtggaaaaggaattatcttcccataagaactagatagatgcattctcagaaactactttgtgacgattgcattcaagtcacagaggtgaacattccctttcagagagcactttggaaactctcgttgtgtagaatctgcaagtggagatatggaccgctttgaggcctatggtagtaaaggaaacagcttcatataaaaactagacagcagcattctcagaaaactctttgtgacgactgagtttaactcacagggctgaacattcctttggatggagcagtatggaaacacactatctgtaggatctgcaagcggatacttgggcctccctgaggatttcgttggaaacgggataaaccgcacagaactaaacagaagcattctcagaactttcttcgtgatgtttgcattcaacccacagtgttgaacctttctttgatagttcaggtttgaaacactctttttgtagaaactgcaagtgtataactgcacttctttgaggcctatcgtagtaaaggaaataacttcctataaaaacaagacagaagctttctcagaaaattctctgggatgattgagttgaactcacagagcagtactttccttgggatggagtagtttcgaaacacactttctgtagaatctgcaagtggatatttggacctgtctgaggaattcgttgcaaacgggataatttcagctaagtaaacagaagcagtctcagaatcttcttgtgatggttgcattcaaatcccagaattgaaccttcctttgaaagttcaggttggaaacactctttttgcaggatctacaagtggatattcggaccactctgtggacttcgttcgaaacgggtatatcttcacataacatctagacagaagcattctcagaaacttttctgtgatgactgcattcaactcacagagttgaacactccttttgagagcgcagttttgaaactctctttctctggaatctgcaaggggacatgcagacctctttgaaggtttcgttggaaacggaatcatcttcacataaaaattacacagaagcatcctcaggaactccttggtgatgtttgtattcaacttccagagttgaactttccttcggaaagagcagctatgaaacacgctttttctagaatctgcaagtggacattgggagggctgtgaggtttgtggtggaaaaggaaatatctccacataaatactagatagaagccttctcagaaactactttgtgatgactgcattcacctcacggagtggagcattcctattgacagagcagtttggaaacactcttcttgtaggatcggctagtggagagttggagcgctttgaggcctatgttagtaaagggaagagcttcacataaaatctagacagaagcattctcagaaaatactttgtgatgattgagtttaacacacagagctgaccattcctttggatggagaaggtttgaagcacactttctgtagaatctgcgagtggatatttggacctctctgaggatttcgttggaaacgggataactgcacctaactaaacggaagcattctcacaaaattctttgtgatgtttgcattcaaatcccagagttgaaccttcctttgatagttcagctttgaaacactctttttgtaggatctgcatgtggatatttggaccactctttggccttcgttcgaaacgggtacatcttcaaataaaatctagacagaagccttctcagaaacttctctgtgacgattgcattcaactcaaagcgttgaaccctcctatggatagagcagttttgaatctctctttttgtggaatctgcaagtggatatgtggtcctctttgaagatgtctttggaaacgggaatatcttcacataaaaactaaacagaagcattctcagaaacttctctgtgatgtttgtgttcaactcacagagtttcacgttgcttttcatagagcagatgagaaacatgcttttcgtagggtctgcaagtggacatttggagagatttcaggcctgtggtggaaaacgaattatcgtcacgtaaaaactagagagaagcattgtcagaaacttgtttgtgatgactgcattccactcacagagttgaaggttccttttcaaacagcagtttccaaacactctttctgtggcatctgcaagtggatgtttgggcctctttgaagatttcgttggaaacgggataatcttcacagaaaagctaaacagaagcattctcagaaacttctttgtgacgtttgctttcaactcacagagttgaactttccttttgagagagaagctttgaaacactctttttctagaatctgcaagtggatatttggagggctttgaggcctgtggtggaaaaggaattatcttcccgtaagaactagatagatgcattctcagaaactactttgtgacgattgcattcaagtcacagaggtgaacattccctttcagagagcactttggaaactctcgttgtgtagaatctgcaagtggagatatggaccgctttgaggcctatggtagtaaaggaaacagcttcatataaaaactagacagcagcattctcagaaaaccctttgtgacgactgagtttaactcacagggctgaacattcctttggatggagcagtttggaaacacactatctgtaggatctgcaagcagatacttgggcctccctgaggatttcgttggaaaccggataaaccgcacagaactaaacagaagcattctcagaaccttcttcgtgatgtttgcattcaacacacagtgttgaacctttctttgatagttcaggtttgaaacactcttttcgtagaaactgcaagtggataactgcacttctttgaggcctatcgtagtaaaggaaataacttcctataaaaacaagacagaagctttctcagaaaattctctgggatgattgagttgaactcacagagcagtactttccttgggatggagtagtttcaaaacacactttctgtagaatctgcaagtggatatttggacctgtctgaggaattcgttgcaaacgggataatttcagctaagtaaacagaagcagtctcagaatcttcttgtgatggttgcattgaaatcccagaattgaaccttcctttgaaagttcaggttggaaacactctttttgcaggatctacaagtggatattcggaccactctgtggacttcgttcgaaacgggtatatcttcacataacatctagacagaagcattctcagaaacttttctgtgatgactgcattcaactcacagagttgaacactccttttgagagcgcagttttgaaactctctttctctggaatctgcaaggggacatgcagacctctttgaaggtttcgttggaaacggaatcatcttcacataaaaattacacagaagcatcctcaggaactccttggtgatgtttgtattcaacttccagagttgaactttccttcggaaagagcagctatgaaacactctttttctagaatctgcaagtggacattgggagggctgtgaggtttgtggtggaaaaggaaatatctccacataaatactagttagaagccttctcagaaactactttgtgatgatcgcattcacctcacggagtggagcattcctattgacagagcagtttggaaacactcttcttgtagaatcggctagtggagatttggagcgctttgaggcctatggtagtaaagggaagagcttcacataaaatctagacagaagcattctcagaaaatactttgtgatgattgagtttaacacacagagctgaacattcctttggatggagaaggtttgaaacacactttctgtagaatctgcgagtggatatttggacctctctgaggatttcgttggaaacgggataactgcacctaactaaacggaagcattctcacaaaattctttgtgatgtttgcattcaaatcccagagttgaaccttcctttgatagttcagctttgaaacactctttttggaggttctgcaggtggatatttggacccctctttggccttcgttcgaaacgggtacatcttcaaataaaatctagacagaagccttctcagaaacttctctgtgacgattgcattcaactcaaagcgttgaaccctcctatggatagagcagttttgaatctctctttttgtggaatctgcaagtggatatgtggtcctctttgaagatgtctttggaaacgggaatatcttcacataaaaactaaacagaagcattctcagaaacttctctgtgatgtttgtgttcaactcacagagtttcacgttgctttccatagagcagatgagaaacatgcttttcgtagggtctgcaagtggacatttggagagatttccggcctgtggtggaaaacgaattatcgtcacgtaaaaactagagagaagcattgtcagaaacttgtttgtgatgactgcattcaactcacagagttgaaggttcctttccaaacagcagtttccaaacactctttctgtggcatctgcaagtggatgtttgggcctctttgaagatttcgttggaaacgggataatcttcacagaaaagctaaacagaagcattctcagaaacttctttgtgatgtttgctttcaactcacagagttgaactttccttttgagagagaagctttgaaacactctttttctagaatctgcaagtggatatttggagggctttgaggcctgaggtggaaaaggaattatcttcccgtaagaactagatagatgcattctcagaaactactttgtgacgattgcattcaagtcacagaggtgaacattccctttcacagagcactttggaaactctcgttgtgtagaatctgcaagtggagatatggaccgctttgaggcctatggtagtaaaggaaacagcttcatataaaaactagacagcagcattctcagaaaactctttctgacgactgagtgtaactcacagggttgaacattcctttggatggagcagtttggaaacacactatctgtaggatctgcaagcggatacttgggcctctctgaggatttcgttggaaacgggataaaccgcacagaactaaacagaagcattctcagaaccttcttcgtgacgtttgcattcaacccacagtgttgaacctttctttggtagttcaggtttgaaacactctttttgtagaaactgcaagtggataactgcacttctttgaggcctatcgtagtaaaggaaataacttcctataaaaacaagacagaagctttctcagaaaattctctgggatgattgagttgaactcacagagcagtactttccttgggatggagtagtttcgaaacacactttctgtagaatctgcaagtggatatttggacctgtctgaggaattcgttgcaaacgggataatttcagctaagttaacagaagcagtctcagaatcttcttgtgatgtttgcattcaaatcccagaattgaaccttcctttgaaagttcaggttggaaacactctttttgcaggatctacaagtggatattcggaccactctgtggacttcgttcgaaacgggtatatcttcacataacatctagacagaagcattctcagaaacttttctgtgatgactgcattcaactcacagagttgaacactccttttgagagcgcagttttgaaactctctttctctggaatctgcaaggggacatgcagacctctttgaaggtttcgttggaaacggaatcatcttcacataaaaattacacagaggcatcctcaggaactccttggtgatgtttgtattcaacttccagagttgaactttccttcggaaagagcagctatgaaacactctctttctagaatctgcaagtggacattgggagggctgtgaggtttgtggtggaaaaggaaatatctccacataaatactagatagaagccttctcagaaacaactttgtgatgattgcattcacctcacggagttgagcattcctattgacagagcagtttggaaacactcttgttgtagaatctgctagtggagatttggagcgctttgaggcctatggtagtaaagggaagagcttcacataaaatctagacagaagcattctcagaaaatactttgtgatgattgagtttagcacacagagctgaacattcctttggatggagaaggtttgaaacacactttctgtagaatctgcgagtggatatttggacctctctgaggatttcgttggaaacgggataactgcacctaactaaacggaagcattctcacaaaattctttgtgatgtttgcattcaaatcccagagttgaaccttcctttgatagttcagctttgaaacactctttttgtaggatctgcaggtggatatttggaccactctttggccttcgttcgaaaagggtacatcttcaaataaaatctagacagaagccttctcagaaacttctctgtgacgattgcattcaactcaaagcgttgaaccctcctatggatagagcagttttgaatctctctttttgtggaatctgcaagtggatatgtggtcctctttgaagatgtctttggaaacgggaatatcttcacataaaaactaaacagaagcattctcagaaacttctctgtgatgtttgtgttcaactcccagagtttcacgttgcttttcatagagcagatgagaaacatgcttttcgtagggtctgcaagtggacatttggagagatttcaggcctgtggtggaaaacgaattatcgtcacgtaaaaactagagagaagcattgtcagaaacttgtttgtgatgactgcattcaactcacagagttgaaggttccttttcaaacagcagtttccaaacactctttctgtggcatctgcaagtggatgtttgggcctctttgaagatttcgttggaaacgggataatcttcacagaaaagctaaacagaagcattctcagaaacttctttgtgatgtttgctttcaactcacagagttgaactttccttttgagagagaagctttgaaacaccctttttctagaatctgcaagtggatatttggagggctttgaggcctgaggtggaaaaggaattatcttcccgtaagaaccagatagatgcattctcagaaactactttgtgacgattgcattcaagtcacagaggtgaacattccctttcagagagcactttggaaactctcgttgtgtagaatctgcaagtggagatatggaccgctttgaggcctatggtagtaaaggaaagagcttcatataaaaactaaacagcagcattctcagaaaactctttgtgacgactgagtttaactcacagggctgaacattcctttggatggagcagtttggaaacacactatctgtaggatctgcaagcggatacttgggcctccctgaggatttcgtgggaaacgggataaaccgcacagaactaaacagaagcattctcagaaccttcttcgtgatgtttgcattcaacccacagtgttgaacctttctttgatagttcaggtttgaaacactctttttgtagaaactgcaagtggataactgcacttctttgaggcctatcgtagtaaaggaaataacttcctataaaaacaagacagaagctttctcagaaaattctctgggatgattgagttgaactcacagagcagtactttccttgggatggagtagtttcgaaacacactttctgtagaatctgcaagtggatatttggacctgtctgaggaattcgttgcaaacgggataatttcagctaagtaaacagaagcagtctcagaatcttcttgtgatgtttgcattcaaatcccagaattgaaccttcctttgaaagttcaggttggaaacactctttttgcaggatctacaagtggatattcggaccactctgtggacttcgttcgaaacgggtatatcttcacaaaacatctagacagaagcattctcagaaacttttctgtgatgactgcattcaactcacagagttgaacactccttttgagagcgcagttttgaaactctctttctctggaatctgcaaggggacatgcagacctctttgaaggtttcgttggaaacggaatcatcttcacataaaaattacacagaagcattctcaggaactccttggtgatgtttgtattcaacttccagagttgaactttccttcggaaagagcagctatgaaacactctttttctagaatctgcaagtggacattgggagggctgtgaggtttgtggtggaaaaggaaatatctccacgtaaatactagatagaagccttctcagaaactactttcagatgattgcattcacctcacggagtggagcattcctattgacagagcagtttggaaacactcttgttgtagaatctgctagtggagatttggagcgctttgaggcctatggtagtaaagggaagagcttcacataaaatcaagacagaagcattctcagaaaatactttgtgatgattgagtttaacacacagagctgaacattactttagatggagcaggtttgaaacacactttctctagaatctgcgagtggatatttggacctctctgaggatttcgttggaaacgggataactgcacctaactaaacggaagcattctcacaaaattcttcgtgatgtttgcattcaaatcccagagttgaaccttcctttgatagttcagctttgaaacactctttttgtaggatctgcaagtggatatttggaccactctttggccttccttcgaaacgggtacatcttcatataaaatctagacagaagccttctcagaaacttctctgtgatgattgcattcaactcaaggcgttgaaccctcctatggatagggcagttttgaatctctctttttgtggaatctgcaagtggatatgtggtcctctttgaagatgtctttggaaacgggaatatcttcacataaaaactaaacagaagcattctcagaaacttctctgtgatgtttgtgtccaaatcacagagtttcacgttgcttttcatagagcagatgagaaacatgcttttcgtagggtctgcaagtggacatttggagagatttcaagcctgtggtggaaaacgaattatcgtcacgtaaaaactagagggaagcattgtcagaaacttgtttgtgatacctgcattcaactcacagagttgaaggttccttttcaaacagcagtttccaaacactctttctgtggcatctgcaagtggatgtttgggcctctttgaagatttcgttggaaacgggataatcttcacagaaaagctaaacagaagcattctcagaaacttctttgtgatgtttgctttcaactcacagagttgaactttccttttgagagagaagctttgaaacactctttttctagaatctgcaagtggatatttggagggctttgaggcctgtggtggaaaacgaattatcttcccgtaagaactagatagatgcattctcagaaactactttgtgacgattgcattcaagtcacagaggtgaacattccctttcacagagcactttggaaactctcgttgtgtagaatctgcaagtggagatatggaccgctttgaggcctatggtagtaaaggaaacagcttcatataaaaactagacagcagcattctcagaaaactctttctgacgactgagtgtaactcacagggttgaacattcctttggatggagcagtttggaaacacactatctgtaggatctgcaagcggatacttgggcctctctgaggatttcgttggaaacgggataaaccgcacagaactaaacagaagcattctcagaaccttcttcgtgacgtttgcattcaacccacagtgttgaaactttctttgatagttcaggtttgaaacactcttttcgtagaaactgcaagtggataactgcacttctttgaggcctatcgtagtaaaggaaataacttcctataaaaacaagacagaagctttctcagaaaattctctgggatgattgagttgaactcacagagcagtactttccttgggatggagtagtttcgaaacacactttctgtagaatctgcaagtggatatttggacctgtctgaggaattcgttgcaaacgggataatttcagctaagtaaacagaagcagtctcagaatcttcttgtgatgtttgcattcaaatcccagaattgaaccttcctttgaaagttcaggtttgaaacacactttttgcaggatccacaagtggatattcggaccactctgtggacttcgatcgaaacgggtatatcttcacataacatctacacagaagcattctcagaaacttttctgtgatgactgcattcaactcacagagttgaacactccttttgagagcgcagttttgaaactctctttctctggaatctgcaaggggacatgcacacctctttgaaggtttcgttggaaacggaatcatcttcacataaaaattacacagaagcattcttaggaactccttggtgatgtttgtattcaacttccagagttgaactttccttcggaaagagcagctatgaaacactctttttctagaatctgcaagtggacattgggagggctgtgaggtttgtggtggaaaaggaaatatctccacgtaaatactagatagaagccttctcagaaactactctgtgatgattgcattcacctcacggagtggagcattcctattgacagagcagtttggaaacactcttgttgtagaatctgctagtggagatttggagcgctttgaggcctatggtagtaaagggaagagcttcacataaaatcttgacagaagcattctcagaaaatactttgtgatgattgagtttaacacacagagctgaacattcctttggatggagaaggtttgaaacacactttctatagaatctgcgagtggatatttggacctctctgaggatttcgttggaaacgggataactgcacctaactaaacggaagcattctcacaaaattctttgtgatgtttgcattcaaatcccagagttgaaccttcctttgatagttcagctttgaaacactctttttgtaggatctgcaggtggatatttggaccactctttggccttcgttcgaaacgggtacatcttcaaataaaatctagacagaagccttctcagaaacttctctgtgacgattgcattcaactcaaagcgttgaaccctcctatggatagagcagttttgaatctctctttttgtggaatctgcaagtggatatgtggtcctctttgaagatgtctttggaaacgggaatatcttcacataaaaactaaacagaagcattctcagaaacttctctgtgatgtttgtgttcaactcacagagtttcacgttgcttttcatagagcagatgagaaacatgcttttcgtagggtctgcaagtggacatttggagagctttcaggcctgtggtggaaaacgaattatcgtcacgtaaaaactagagagaagcattgtcagaaacttgtttgtgatgactgcattcaactcacagagttgaaggttccttttcaaacagcagtttccaaacactctttctgtggcatctgcaagtggatgtttgggtctctttgaagatttcgttggaaacgggataatcttcacagaaaagctaaacagaagcattctcagaaacttctttgtgatgtttgctttcaactcacagagttgaactttccttttgagagagaagctttgaaacactctttttctagaatctgcaagtggatatttggagggctttgaggcctgaggtggaaaaggaattatcttcccgtaagaactagatagatgcattctcagaaactactttgtgacgaatgcattcaagtcacagaggtgaacattccctttcagagagcactttggaaactctcgttgtgtagaatctgcaagtggagatatgcaccgctttgaggcctacggtagtaaaggaaacagcttcatataaaaactagacagcagcattctcagaaaactctttgtgacgactgagtttaactcacagggctgaacattcctttggatggagcagtttggaaacacactatctgtaggatctgcaagcggatacttgggcctccctgaggatttcgttggaaacgggataaaccgcacagaactaaacagaagcattctcagaaccttcttcgtgacgtttgcattcaacccacagtgttgaacctttctttgatagttcaggtttgaaacactctttttgtagaaactgcaagtggataactgcacttctttgaggcctatcgtagtaaaggaaataacttcctataaaaacaagacagaagctttctcagaaaattctctgggatgattgagttgaactcacagagcagtactttccttgggatggagtagtttcgaaacacactttctgtagaatctgcaagtggatatttggacctgtctgaggaattcgttgcaaacgggataatttcagctaagtaaacagaagcagtctcagaatcttcttgtgatgtttgcattcaaatcccagaattgaaccttcctttgaaagttcaggttggaaacactctttttgcaggatctacaagtggatattcggaccactctgtggacttcattcgaaacgggtatatcttcacataacatctagacagaagcattctcagaaacttttctgtgatgactgcattcaactcacagagttgaacactccttttgagagcgcagttttgaaactctctttctctggaatctgcaaggggacatgcagacctctttgaaggtttcgttggaaacggaatcatcttcacataaaaattacacagaagcattctcaggaactccttggtgatgtttgtattcaacttccagagttgaactttccttcggaaagagcagctatgaaacactctttttctagaatctgcaagtggacattgggagagctgtgaggtttgtggtgtaaaaggaaatatctccacataaatactagatagaagccttctcagaaactactttgtgatgattgcattcacctcacggagtggagcattcctattgacagagcagtttggaaacactcttgttgtagaatcggctagtggagatttggagcgctttgaggcctatggtagtaaagggaagagcttcacataaaatctagacagaagcattctcagaaaatactttgtgatgattgagtttaacacacagagctgaacattcctttggatggagaaggtttgaaacacactttctgtagaatctgcgagtggatatttggacctctctgaggatttcgttggaaacgggataactgcacctaactaaacggaagcattctcacaaaattctttgtgatgtttgcattcaaatcccagagttgaaccttcctttgatagttcagctttgaaacactctttttgtaggatctgcaggtggatatttggaccactctttggccttcgttcgaaacgggtacatcttcaaataaaatctagacagaagccttctcagaaacttctctgtgacgattgcattcaactcaaagagttgaaccctcctatggatagagcagttttgaatctctctttttgtggaatctgcaagtggatatgtggtcctctttgaagatgtctttggaaacgggaatatcttcacataaaaactaaacagaagcattctcagaaacttctctgtgatgtttgtgttcaactcacagagtttcacgttgcttttcatagagcagatgagaaacatgcttttcgtagggtctgcaagtggacatttggagagctttcaggcctgtggtggaaaacgaattatcgtcacgtaaaaactagagagaagcattgtcagaaacttgtttgtgatgactgcattcaactcacagagttgaaggttccttttcaaacagcagtttccaaacactctttctgtggcatctgcaagtggatgtttgggcctctttgaagatttcgttggaaacgggataatcttcacagaaaagctaaacagaagcattctcagaaacttctttgtgatgtttgctttcaactcacagagttgaactttccttttgagagagaagctttgaaacactctttttctagaatatgcaagtggatatttggagggctttgaggcctgaggtggaaaaggaattatcttcccgtaagaactagatagatgcattctcagaaactactttgtgacgattgcattcaagtcacagaggtgaacattccctttcacagagcactttggaaactctcgttgtgtagaatctgcaagtggagatatggaccgctttgaggcctatggtagtaaaggaaacagcttcatataaaaactagacagcagcattctcagaaaactcttagtgacaactgagtttaactcacagggctgaacattcctttggatggagcagtttggaaatacactatctgtaggatctgcaagcggatacttgggcctctctgaggatttcgttggaaacgggataaaccgcacagaactaaacagaagcattctcagaaccttcttcgtgatgtttgcattcaacccacagtgttgaacctttctttgatagttcaggtttgaaacactctttttgtagaaactgcaagtggataactgcacttctttgaggcctatcgtagtaaaggaaataacttcctataaaaacaagacagaagctttctcagaaaattctctgggatgattgagttgaacacacagagcagtactttccttggaatggagtagtttcgaaacacactttctgtagaatctgcaagtggatatttggacctgtctgaggaattcgttgcaaacgggataatttcagctaagtaaacagaagcagtctcagaatcttcttgtgatgtttgcattcaaatcccagaattgaaccttcctttgaaagttcaggttggaaacactctttttgcaggatctacaagtggatattcggaccactctgtggacttcgttcgaaacgggtaaatcttcacataacatctagacagaagcattctcagaaacttttctgtgatgactgcattcaactcacagagttgaactctccttttgagagcgcagttttgaaattctctttctctggaatctgcaaggggacatgcagacctctttgaaggtttcgttggaaacggaatcatcttcacataaaaattacacagaggcatcctcaggaactccttggtgaagtttgtattcaacttccagagttgaactttccttcggaaagagcagctatgaaacactctctttctagaatctgcaagtggacattgggagggctgtgaggtttgtggtggaaaaggaaatatctccacataaatactagatagaagccttctcagaaactacgttgtgatgattgcattcacctcacggagtggagcattcctattgacagagcagtttggaaacactcttgttgtagaatctgctagtggagatttggagcgctttgaggcctatggtagtaaagggaagagcttcacataaaatctagacagaagcattctcagaaaatactttgtgatgattgagtttaacacacagacctgaacattcctttggatggagaaggtttgaaacacactttctgtagaatctgcgagtggatatttggacctctctgaggatttcgttggaaacgggataactgcacctaactaaacggaagcattctcacaaaattctttgtgatgtttgcattcaaatcccagagttgaaccttcctttgatagttcagctttgaaacactctttttgtaggatctgcaggtggatatttggaccactctttggccttcgttcgaaacgggtacatcttcaaataaaatctagacagaagccttctcagaaacttctctgtgacgattgcattcaactcaaagcgttgaaccctcctatggatagagcagttttgaatctctctttttgtggaatctgcaagtggatatgtggtcctctttgaagatgtctttggaaacgggaatatcttcacataaaaactaaacagaagcattctcagaaacttctctgtgatgtttgtgttcaactcccagagtttcatgttgcttttcatagagcagatgagaaacatgcttttcgtagggtctgcaagtggacatttggagagatttccggcctgtggtggaaaacgaattatcgtcacgtaaaaactagagagaagcattgtcagaaacttgtttgtgatgactgcattcaactcacagagttgaaggttccttttcaaacagcagtttccaaacactctttctgtggcatctgcaagtggatgtttgggcctctttgaagatttcgttggaaacgggataatcttcacagaaaagctaaacagaagcattctcagaaacttctttgtgatgtttgctttcaactcacagagttgaactttccttttgagagagaagctttgaaacactctttttctagaatctgcaagtggatatttggagggctttgaggcctgaggtggaaaaggaattatcttcccgtaagaactagatagatgcattctcagaaactactttgtgacgattgcattcaagtcacagaggtgaacattccctttcagagagcactttggaaactctcgttgtgtagaatctgcaagtggagatatggaccgctttgaggcctatggtagtaaaggaaacggcttcatataaaaactagacagcagcattctcagaaaactctttgtgacgactgagtttaactcacagggctgaacattcctttggatggagcagtttggaaacacactatctgtaggatctgcaagcggatacttgggcctccctgaggatttcgttggaaatgggataaaccgcacagaactaaacagaagcattctcagaaccttcttcgtgacgtttgcattcaacgcacagtgttgaacctttctttgatagttcagatttgaaacactctttttgtagaaactgcaagtggataactgcacttctttgaggcctatcgtagtaaaggaaataacttcctataaaaacaagacagaagctttctcagaaaattctctgggatgattgagttgaactcacagagcagtactttccttgggatggagtagtttcgaaacacactttctgtagaatctgcaagtggatatttggacctgtctgaggaattcgttgcaaacgggataatttcagctaagtaaacagaagcagtctcagaatcttcttgtgatgtttgcattcaaatcccagaatggaaccttcctttgaaagttcaggttggaaacactctttttgcaggatctacaagtgtatattcggaccactctgtggacttcgttcgaaacgggtatatcttcacataacatctagacagaagcattctcagaaacttttctgtgatgactgcattcaactcacagagttgaacactccttttgagagcgcagttttgaaactctctttctctggaatctgcaaggggacatgcagacctctttgaaggtttcgttggaaacggaatcatcttcacataaaaattacacggaagcatcctcaggaactccttggtgatgtttgcattcaacttccagagttgaactttccttcggaaagagcagctatgaaacactctttttctagaatctgcaagtggacattgggagggctgtgaggtttgtggtggaaaaggaaatatctccacataaatactagatagaagccttctcagaaactactttgtgatgactgcattcacctcacggagtggagcattcctattgacagagcagtttggaaacactcttcttgtagaatcggctagtggagagttggagcgctttgaggcctatggtagtaaagggaagagcttcacataaaatctagacagaagcattctcagaaaatactttgtgatgattgattttaacacacagagctgaacattcctttggatggagaaggtttgaaacacactttctgtagaatctgcgagtggatatttggacctctctgaggatttcgttggaaacgggataactgcacctaactaaacggaagcattctcacaaaattctttgtgatgtttgcattcaaatcccagagttgaaccttcctttgatagttcagctttgaaacactctttttgtaggttctgcaggtggatatttggaccactctttggccttcgttcgaaacgggtacatcttcaaataaaatctagacagaagccttctcagaaacttctctgtgacgattgcattcaactcagagagttgaaccctcctatggatggagcagttttgaatctctctttttgtggaatctgcaagtggatatgtggtcctctttgaagatgtctttggaaacgggaatatcttcacataaaaactaaacagaagcattctcagaaacttctctgtgatgtttgtgttcaactcacagagtttcacgttgcttttcatagagcagatgagaaacatgcttttcgtagggtctgcaagtggacatttggagagctttcaggcctgtggtggaaaacgaattatcgtcacgtaaaaactagagagaagcattgtcagaaacttgtttgtgatgactgcattcaactcacagagttgaaggttccttttcaaacagcagtttccaaacactcttcctgtggcatctgcaagtggatgtttgggcctctttgaagatttcgttggaaacgggataatcttcacagaaaagctaaacagaagcattctcagaaacttctttgtgatgtttgctttcaactcacagagttgaactttccttttgagagagaagctttgaaacactctttttctagaatctgcaagtggatatttggagggctttgaggcctgaggtggaaaaggaattatcttcccgtaagaactagatagatgcattctcagaaactactttgtgacgattgcattcaagtcacagaggtgaacattccctttcacagagcactttggaaactctcgttgtgtagaatctgcaagtggagatatggaccgctttgaggcctatggtagtaaaggaaacagcttcatataaaaactagacagcagcattctcagaaaactctttgtgacgactgagtttaactcacagggctgaacattcctttggatggagcagtttggaaacacactatctgtaggatctgcaagcggatacttgggcctccctgaggatttcgttggaaacggaataaaccgcacagaactaaacagaagcattctcagaaccttcttcgtgatgtttgcattcaacccacagtgttgaacctttctttgatagttcaggtttgaaacactctttttgtagaaactgcaggtggataactgcacttctttgaggcctatcgtagtaaaggaaataacttcctataaaaacaagacagaagctttctcagaaaattctctgggatgattgagttgaactcacagagcagtactttccttgggatggagtagtttcgaaacacactttctgtagaatctgcaagtggatatttggacctgtctgaggaattcgttgcaaacgggataatttcagctaagtaaacagaagcagtctcagaatcttcttgtgatgtttgcattcaaatcccagaattgaaccttcctttgaaagttcaggttggaaacactctttttgcaggatctacaagtggatattcggaccacactgtggacttcgttcgaaacgggtatatcttcacataacatctagacagaagcattctcagaaacttttctgtgatgactgcattcaactcacagagttgaacactccttttgagagcgcagttttgaaactctctttctctggaatctgcaaggggacatgcagacttctttgaaggtttcgttggaaacggaatcatcttcacataaaaattacacagaggcatcctcaggaactccttggtgatgtttgtattcaacttccagagttgaactttccttcggaaagagcagctatgaaacactctttttctagaatctgcaagtggacattgggagggctgtgaggtttgtggtggaaaaggaaatatctccacataaatactagatagaagccttctcagaaactactttgtgatgattgcattcacctcacggagtggagcatccctattgacagagcagtttggaaacactcttgttgtagaatcggctagtggagatttggagcgctttgaggcctatggtagtaaagggaagagcttcacataaaatctagacagaagcattctcagaaaatactttgtgatgattgagtttaacacacagagctgaacattcctttggatggagaaggtttgaaacacactttctgtagaatctgcgagtggatatttggacctctctgaggatttcgttggaaacgggataactgcacctaactaaacggaagcattctcacaaaattctttgtgatgtttgcattcaaatcccagagttgaaccttcctttgatagttcagctttaaaacactctttctgtaggttctgcaggtggatatttggaccactctttggccttctttcgaaacgggaacatcttcaaataaaatctagacagaagccttctcagaaacttctctgtgacgattgcattcaactcaaagcgttgaaccctcctatggatagagcagttttgaatctctctttttgtggaatcttcaagtggatatgtggtcctctttgaagatgtctttggaaacgttaatatcttcacataaaaactaaacagaagcattctcagaaacttctctgtgatgtttgtgttcaactcacagagtttcacgttgcttttcatagagcagatgagaaacatgcttttcgtagggtctgcaagtggacatttggagagatttcaggcctgtggtggaaaacgaattatcgtcacgtaaaaacagagagaagcattgtcagaaacttgtttgtgatgactgcattcaactcacagagttgaaggttccttttcaaacagcagtttccaaacactctttctgtggcatctgcaagtggatgtttgggcctctttgaagatttcgttggaaacgggataatcttcacaggaaagctaaacagaagcattctcagaaacttctttgtgatgtttgctttcaactcacagagttgaactttccttttgagagagaagctttgaaacactctttttctagaatctgcaagtggatatttggagggctttgaggcctgtggtggaaaaggaattatcttcccataagaactagatagatgcattctcagaaactactttgtgacgattgcattcaagtcacagaggtgaacattccctttcagagagcactttggaaactctcgttgtgtagaatctgcaagtggagatatggaccgctttgaggcctatggtagtaaaggaaacagcttcatataaaaactagacagcagcattctcagaaaactctttgtgacgactgagtttaactcacagggctgaacattcctttggatggagcagtttggaaacacactatctgtaggatctgcaagcggatacttgggcctctctgaggatttcgttggaaacggaataaaccgcacagaactaaacagaagcattctcagaaccttcttcgtgatgtttgcattcaacccacagtgttgaacctttctttgatagttcaggtttgaaacactctttttgtagaaactgcaagtggataactgcacttctttgaggcctatcatagtaaaggaaataacttcctataaaaacaagacagaagctttctcagaaaattctctgggatgattgagttgaactcacagagcagtactttccttgggatggagtagtttcgaaacacactttctgtagaatctgcaagtggatatttggacctgtctgaggaattcgttgcaaacgggataatttcagctaagtaaacagaagcagtctcagaatcttcttgtgatgtttgcattcaaatcccagaattgaaccttcctttgaaagttcaggttggaaacactctttttgcaggatctacaagtggatattcggaccactctgtggacttcgttcgaaacgggtatatcttcacataacatctagacagaagcattctcagaaacttttctgtgatgactgcattcaactcacagagttgaacactccttttgagagcgcagtttggaaactctctttctctggaatctgcaaggggacatgcagacctccttgaaggtttcgttggaaacggaatcatcttcacataaaattacacagaagcatcctcaggaactccttggtgatgtttgtattcaacttccagagttgaactttccttcggaaagagcagctatgaaacactctttttctagaatctgcaagtggacattgggagggctgtgaggtttgtggtggaaaaggaaatatctccacataaatactagatagaagccttctcagaaactactttgtgatgattgcattcacctcacagagtggagcattcctattgacagagcagtttggaaacactcttcttgtagaatcggctagtggagatttggagcgctttgagtcctatggtagtaaagggaagaacttcacataaaatcaagacagaagcattctcagaaaatactttgtgatgattgagtttaacacacagagctgaacattcctttggatggagaaggtttgaaacacactttctgtagaatctgcgagtggatatttggacctctctgaggatttcgttggaaacgggataactgcacctaactaaacggaagcattctcacaaaattctttgtgatgtttgcattcaaatcccagagttgaaccttcctttgatagttcagctttgaaacactctttttgtaggatctgcaagtggatatttggaccactctttggccttcgttcgaaacgggtacatcttcaaataaaatctagacagaagccttctcagaaacttctctgtgatgattgcattcaactcaaagtgttgaaccctcctatggatagagcagttttgaatctctctttttgtggaatctgcaagtggatatgtggtcctctttgaagatgtctttggaaacgggaatatcttcacataaaaactaaacagaagcattctcataaacttctctgtgatgtttgtgtccaaatcacagagtttcacgttgcttttcatagagcagatgagaaacatgcttttcgtagggtctgcaagtggacatttggagagatttcaagcctgtggtggaaaacgaattatcgtcacgtaaaaactagagggaagcattgtcagaaacttgtttgtgatgactgccttcaactcacagagttgaaggttccttttcaaacagcagtttccaaacactctttctgtggcatctgcaagtggaggtttgggcctctttgaagatttcgttggaaacgggataatcttcacagaaaagctaaacagaagcattctcagaaacttctttgtgatgtttgctttcaactcacagagttgaactttccttttgagagagaagctttgaaacactctttttctagaatctgcaagaggatatttggagggttttgaggcctgaggtggaaaaggaattatcttcccgtaagaactagatagatgcattctcagaaactactttgtgacgattgcattcaagtcacagaggtgaacattccctttcagagagcactttggaaactctcgttgtgtagaatctgcaagtggagatatggaccgctttgaggcctatggtagtaaaggaaacagcttcatataaaaactagacagcagcattctcagaaaactctttgtgacgactgagtttaactcacagggctgaacattcctttggatggagcagtttggaaacacactatctgtaggatctgcaagcggatacttgggcctccctgaggatttcgttggaaacgggataaaccgcacagaactaaacagaagcattctcagaaccttcttcgtgatgtttgcattcaacccacagtgttgaacctttctttgatagttcaggtttgaaacactctttctgtagaaactgcaagtggataactgcacttctttgaggcctatcgtagtaaaggaaataacttcctataaaaacaagacagaagctttctcagaaaattctctgcgatgattgagttgaactcacagagcagtactttccttgggatggagtagtttcgaaacacactttctgtagaatctgcaagtggatatttggacctgtctgaggaattcgttgcaaacgggataatttcagctaagtaaacagaagcagtctcagaatcttcttgtgatggttgcattcaaatcccagaattgaaccttcctttgaaagttcaggttggaaacactctttttgcaggatctacaagtggatattcggaccactctgtggacttcgttcgaaacgggtatatcttcacataacatctagacagaagcattctcagaaacttttctgtgatgactgcattcaactcacagagttgaacactccttttgagagcgcagttttgaaactctctttctctggaatctgcaaggggacatgcagacctctttgaaggtttcattggaaacggaatcatcttcacataaaaattacacagaagcatcctcaggaactccttggtgatgtttgtattcaacttccagagttgaactttccttcggaaagagcagctatgaaacactctttttctagaatctgcaagtggacattgggagggctgtgaggtttgtggtggaaaaggaaatatctccacataaatactagatagaaaccttctcagaaactactttgtgatgattgcattcacctcacggattggagcattcctattgacagagcagtttggaaacactcttcttgtagaatcggctagtggagatttggagcgctttgaggcctatggtagtaaagggaagagcttcacataaaatctagacagaagcattctcagaaaatactttgtgatgattgagtttaacacacagagctgaacattcctttggatggagaaggtttgaaacacactttctgtagaatctgcgagtggatatttggacctctctgaggattttgttggaaacgggataactgcacctaactaaacggaagcattctcacaaaattctttgtgatgtttgcattcaaatcccagagttgaaccttcctttgatagttcagctttgaaacactctttttgtaggatctgcaggtggatatttggaccactctttggccttcgttcgaaaagggtacatcttcaaataaaatctagacagaagccttctcagaaacttctctgtgacgattgcattcaactcaaagcgttgaaccctcctatggatagagcagttttgaatctctctttttgtggaatctgcaagtggatatgtggtcctctttgaagatgtctttggaaacgggaatatcttcacataaaaactaaacagaagcattctcagaaacttctctgtgatgtttgtgttcaactcacagagtttcacgttgcttttcatagagcagatgagaaacatgcttttcgtagggtctgcaagtggacatttggagagatttcaggcctgtggtggaaaacgaattatcgtcacgtaaaaactagagagaagcattgtcagaaacttgtttgtgatgactgcattcaactcacagagttgaaggttccttttcaaacagcagtttccaaacactctttctgtggcatctgcaagtggatgtttgggcctctttgaagatttcgttggaaacgggataatcttcacagaaaagctaaacagaagcattctcagaaacttctttgtgatgtttgctttcaactcacagagttgaactttccttttgagagagaagctttgaaacactctttttctagaatctgcaagtggatatttggagggctttgaggcctgtggtggaaaaggaattatcttcccataagaactagatagatgcattctcagaaactactttgtgacgattgcattcaagtcacagaggtgaacattccctttcagagagcactttggaaactctcgttgtgtagaatctgcaagtggagatatggactgctttgaggcctatggtagtaaaggaaacagcttcatataaaaactagacagcagcattctcagaaaactctttgtgacgactgagtttaactcacagggctgaacattcctttggatggagcagtttggaaacacactatctgtaggatctgcaagcggatacttgggcctccatgaggatttcgttggaaacgggataaaccacacagaactaaacagaagcattctcagaaccttcttcgtgacgtttacattcaacgcacagtgttgaacctttctttgatagttcaggtttgaaacactctttttgtagaaactgcaagtggataactgcacttctttgaggcctatcgtagtaaaggaaataacttcctataaaaacaagacagaagctttctcagaaaattctctgggatgattgagttgaactcacagagcagtactttccttgggatggagtagtttcgaaacacactttctgtagaatctgcaagtggatatttggacctgtctgaggaattcgttgcaaacgggataatttcagctaagtaaacagaagcagtctcagaatcttcttgtgatgtttgcattcaaatcccagaatggaaccttcctttgaaagttcaggttggaaacactctttttgcaggatctacaagtggatattcggaccactctgtggacttcgttcgaaacgggtatatcttcacataacatctagacagaagcattctcagaaacttttctgtgatgactgcattcaactcacagagttgaacactccttttgagagcgcagttttgaaactctctttctctggaatctgcaaggggacatgcagacctctttgaaggtttcgttggaaacggaatcatcttcacataaaaattacacggaagcatcttcaggaactccttggtgatgtttgtattcaacttccagagttgaactttccttcggaaagagcagctatgaaacactctttttctagaatctgcaagtggacattgggagggctgtgaggtttgtggtggaaaaggaaatatctccacataaatactagatagaagccttctcagaaactcctttgtgatgattgcattcacctcacggagttgagcactcctattgacagagcagtttggaaacactcttgttgtagaatctcctagtggagatttggagcgctttgaggcctatggtagtaaagggaagagcttcacataaaatctagacagaagcattctcagaaaatactttgtgatgattgagtttaacacacagagctgaacattcctttggatggagaaggtttgaaacacactttctgtagaatctgcgagtggatatttggacctctctgaggatttcgttggaaacgggataactgcacctaactaaacggaagcattctcacaaaattctttgtgatgtttgcattcaaatcccagagttgaaccttcctttgatagttcagctttgaaacactctttttgtaggttctgcaggtggatatttggaccactctttggccttcgttcgaaacgggtacatcttcaaataaaatctagacagaagccttctcagaaaacttctctgtgatgattgcattcaactgaaggcgttgaaccctcctatggatagggcagttttgaatctctctttttgtggaatctgcaagtggatatgtggtcctctttgaagatgtctttggaaacgggaatatcttcacataaaaactaaacagaagcattctcagaaacttctctgtgatgtttgtgtccaactcaaagagtttcacgttgcttttcatagagcagatgagaaacatgcttttcgtagggtctgcaagtggacatttggagagatttcaggcctgtggtggaaaacgaattatcgtcacgtaaaaactagagagaagcattgtcagaaacttgtttgtgatgactgcattcaactcacagagttgaaggttccttttcaaacagcagtttccaaacactctttctgtggcatctgcaagtggatgtttgggcctctttgaagatttcgttggaaacgggataatcttcacagaaaagctaaacagaagcattctcagaaacttctttgtgatgtttgctttcaactcacagagttgaactttccttttgagagagaagctttgaaacactctttttctagaatctgcaagtggatatttggagggctttgaggcctgaggtggaaaaggaattatcttcccgtaagaactagatagatgcattctcagaaactactttgtgacgattgcattaaagtcacacaggtgaacattccctttcagagagcactttggaaactctcgttgtgtagaatctgcaagtggagatatggaccgctttgaggcctatggtagtaaaggaaacagcttcatataaaaactagacagcagcattctcagaaaactctttgtgacgactgagtttaactcacagggctgaacattcctttggatggagcagtttggaaacacactatctgtaggatctgcaagcggatacttgggcctccctgaggatttcgttggaaacgggataaaccgcacagaactaaacagaagcattctcagaaccttcttcgtgatgtttgcattcaacccacagtgttgaacctttctttgatagttcaggtttgaaacactgtttttgtagaaactgcaagtggataactgcacttctttgaggcctatcgtagtaaaggaaataacttcctataaaaacaagacagaagctttctcagaaaattctctgggatgattgagttgaactcacagagcagtactttctttgggatggagtagtttcgaaacacactttctgtacaatctgcaagtggatatttggacctgtctgaggaattcgttgcaaacgggataatttcagctaagtaaacagaagcagtctcagaaacttcttgtgatgtttgcattcaaatcccagaattgaaccttcctttgaaagttcaggttggaaacactctttatgcaggatctacaagtggatattcggaccactctgtggacttcgttcgaaacgggtatatcttcacataacatctagacagaagcattctcagaaacttttctgtgatgactgcattcaactcacagagttgaacactccttttgagagcgcagttttgaaactctctttctctggaatctgcaaggggacatgcagacctctttgaaggtttcgttggaaacggaatcatcttcacataaaaattacacagaggcatcctcaggaactccttggtgatgtttgtattcaacttccagagttgaactttccttcggaaagagcagctatgaaacactctctttctagaatctgcaagtggacattgggagggtgtgaggtttgtggtggaaaaggaaatatctccacataaatactagatagaagccttctcagaaactactttgtgatgattgcattcacctcacggagtggagcattcctattgacagagcagttggaaacactcttgttgtagaatctgctagtggagatttggagcgctttgagacctatggtagtaaaaggaagagcttcacgtaaaatctagacagaagcattctcagaaaatactttgtgatgattgagtttaacacacagagctgaacattcctttggatggagaaggtttgaaacacactttctgtagaatctgcgagtggatatttggacgtctctgaggatttcgttggaaacgggataactgcacctaactaaacggaagcattctcacaaaattctttgtgatgtttgcattcaaatcccagagttgatccttcctttgatagttcagctttgaaacactctttttgtaggatctgcaagtggatatttggaccactctttggccttcgttcgaaacgggtacatattcaaataaaatctagacagaagccttctcagaaacttctctgtgacgattgcattcaactcaaagcgttgaaccctcctatggatagagcagttttgaatctctctttttgtggaatctgcaagtggatatgtggtcctctttgaagatgtctttggaaacgggaatatcttcacataaaaactaaacagaagcattctcagaaacttctctgtgatgtttgtgttcaactcacagagtttcacgttgcttttcatagagcagatgagaaacatgcttttcgtagggtctgcaagtggacatttggagagatttcaggcctgtggtggaaaacgaattatcgtcacgtaaaaactagagggaagcattgtcagaaacttgtttgtgatgactgcattcaactcacagtagttgaaggttccttttcaaacagcagtttccaaacactctttctgtggcatctgcaagtggatgtttgggcctctttgaagatttcgttggaaacgggatactcttcacagaaaagctaaacagaagcattctcagaaacttctttgtgatgtttgctttcaactcacagagttgaactttccttttgagagagaagctttgaaacactctttttctagaatctgcaagtggatatttggagggctttgaggcctgaggtggaaaaggaattatcttcccgtaagaactagatagatgcattctcagaaactactttgtgacgattgcattcaagtcacagaggtgaacattccctttcacagagcactttggaaactctcgttgtgtagaatctgcaagtggagatatggaccgctttgaggcctatggtagtaaaggaaacagcttcatataaaaactagacagcagcattctcagaaaactctttgtgacgactgagtttaactcacagggctgaacattcctttggatggagcagtttggaaacacactatctgtaggatctgcaagcggatacttgggcctccctgaggatttcgttggaaacgggataaaccgcacagaactaaagagaagcattctcagaaccttcttcgtgacgtttgcattcaacccacagtgttgaacctttctttgatagttcaggtttgaaacactctttttgtagaaactgcaagtggataactgcacttctttgaggcctatcgtagtaaaggaaataacttcctataaaaacaagacagaagctttctcagaaaattctctgggatgattgagttgaactcacagagcagtactttccttgggatggagtagtttcgaaacacactttctgtagaatctgcaagtggatatttggacctgtctgaggaattctttgcaaaagggataatttcagctaagtaaacagaagcagtctcagaatcttcttgtgatgtttgcattcaaatcccagaattgaaccttctttgaaagttcaggtttgaaacactctttttgcaggatctacaagtggatattcggaccactctgtggacttcgatcgaaacgggtatatcttcatataacatctacacagaagcattctcagaaacttttctgtgatgactgcattcaactcacagagttgaacacaccttttgagagcgcagttttgaaactctctttctctagaatctgcaaggggacatgcagacctctttgaaggtttcgttggaaacggaatcatcttcacataaaaattacacagaagcatcctcaggaactccttggtgatgtttgtattcaacttccagagttgaactttccttcggaaagagcagctatgaaacactctttttctagaatctgcaagtggacattgggagggctgtgaggtttgtggtggaaaaggaaatatctccacataaatactagatagaagccttctcagaaactactttgtcatgattgcattcacctcacggagtggagcattcctattgacagagcagtttggaaacactcttcttgtagaatcggctagtggaggtttggagcgctttgaggcctatggtagtaaagggaagagcttcacatgaaatctagacagaagcattctcagaaaatactttgtgatgattgagtttaacacacagagctgaacattcctttggatggagaaggtttgaaacacactttctgtagaatctgcgagtggatatttggacctctctgaggatttcgttggaaacgggataactgcacctaactaaacggaagcattctcacaaaattctttgtgatgtttgcattcaaatcccagagttgatccttcctttgatagttcagctttgaaacactctttttgtaggatctgcaagtggatatttggaccactctttggccttcgttcgaaacgggtacatattcaaataaaatctagacagaagccttctcagaaacttctctgtgacgattgcattcaactcaaagcgttgaaccctcctaaggatagagcagttttgaatctctctttttgtggaatctgcaagtggatatgtggtcctctttgaagatgtctttggaaacgggaatatcttcatattaaaactaaacagaagcattctcagaaacttctctgtgatgtttgtgttcaactcacagagtttcacgttgcttttcatagagcagatgagaaacatgcttttcgtagggtctgcaagtggacatttggagagctttcaggcctgtggtggaaaacgaattatcgtcacgtaaaaactagagagaagcattgtcagaaacttgtttgtgatgactgcattcaactcacagagttgaaggttccttttcaaacagcagtttccaaacactctttctgtggcatctgcaagtggatgtttgggcctctttgaagatttcgttggaaacgggataatcttcacagaaaagctaaacagaagcattctcagaaacttctttgtgatgtttgctttcaactcacagagttgaactttccttttgagagagaagctttgaaacactctttttctagaatctgcaagtggatatttggagggctttgaggcctgtggtggaaaaggaattatcttcccgtaagaactagatagatgcattctcagaaactactttgtgacgattgcattcaagtcacagaggtgaacattccctttcagagagcactttggaaactctcgttgtgtagaatctgcaagtggagatatggaccgctttgaggcctatggtagtaaaggaaacagcttcatataaaaactagacagcagcattctcagaaaactgtttgtgacgactgagtttaactcacagggctgaacattcctttggatggagcagtttggaaacacactatctgtaggatctgcaagcggatacttgggcctccctgaggatttcgttggaaacgggataaaccgcacagaactaaacagaagcattctcagaaccttcttcgtgatgtttgcattcaacccacagtgttgaacctttctttgatagttcaggtttgaaacactctttttgtagaaactgcaagtggataactgcacttctttgaggcctatcgtagtaaaggaaataacttcctataaaaacaagacagaagctttctcagaaaattctctgggatgattgagttgaactcacagagcagtactttccttgggatggagtagtttcaaaacacactttctgtagaatctgcaagtggatatttggacctgtatgaggaattcgttgcaaacaggataatttcagctaagtaaacagaagcagtctcagaatcttcttgtgatgtttgcattcaaatcccagaattgaaccttcctttgaaagttcaggttggaaacactctttttgcaggatctacaagtggatattcagaccactctgtggacttcgttcgaaacgggtatatcttcacataacatctagacagaagcattctcagaaacttttctgtgatgactgcattcaactcacagagttgaacactccttttgagagcgcagttttgaaactctctttctctggaatctgcaaggggacatgcagacctctttgaagatttcgttggaaacggaatcatcttcacataaaaattacacagaagcatcctcaggaactccttggtgatgtttgtattcaacttccagagttgaactttccttcggaaagagcagctatgaaacactctttttctagaatctgcaagtggacattgggagggctgtgaggtttgtggtggaaaaggaaatatctccacataaatactagatagaagccttctcagaaactactttgtgatgattgcattcacctcacggtgtagagcattcctattgacagagcagtttggaaacactcttgttgtagaatctgctagtggagatttggagcgctttgaggcctatggtagtaaagggaagagcttcacataaaatcaagacagaagcattctcagaaaatactttgtgatgattgagtttaacacacagagctgaacattcctttggatggagaaggtttgaaacacactttctgtagaatctgcgagtggatatttggacctctctgaggatttcgttggaaacgggataactgcacctaactaaacggaagcattctcacaaaattctttgtgatgtttgcattcaaatcccagagttgaaccttcctttgatagttcagttttgaaacactctttttgtaggatctgcaggtggatatttggaccactctttggccttcgttcgaaaagggtacatcttcaaataaaatctagacagaagccttctcagaaacttctctgtgacgattgcattcaactcagagagttgaaccctcctatggatagagcagttttgaatctctctttttgtggaatctgcaagtggatatgtggtcctctttgaagatgtctgtggaaacgggaatatcttcacataaaaactaaacagaagcattctcagaaacttctctgtgatgtttgtgttcaactcacagagtttcacgttgcttttcatagagcagatgagaaacatgcttttcgtagggtctgcaagtggacatttggagagctttcaggcctgtggtggaaaacgaattatcgtcacgtaaaaactagagagaagcattttcagaaacttgtttgtgatgactgcattcaactcacagagttgaaggttccttttcaaacagcagtttccaaacactctttctgtggcatctgcaagtggatgtttgggcctctttgaagatttcgttggaaacgggataatcttcacagaaaagctaaacagaagcattctcagaaacttctttgtgatgtttgctttcaactcacagagttgaactttccttttgagagagaagctttgaaacactctttttctagaatctgcaagtggatatttggagggctttgaggcctgtggtggaaaaggaattatcttcccgtaagaactagatagatgcattctcagaaactactttgtgacgattgcattcaagtcacagaggtgaacattccctttcacagagcactttggaaactctcgttgtgtagaatctgcaagtggagatatggaccgctttgaggcctatggtagtaaaggaaacagcttcatataaaaactagacagcagcattctcagaaaactctttgtgacgactgagtttaactgacagggctgaacattcctttggatggagcagtttggaaacacactatctgtaggatctgcaagcggatacttgggcctctctgaggatttcgttggaaacgggataaaacgcacagaactaaacagaagcattctcagaaccttcttcgtgatgtttgcattcaacccacagtgttgaacctttctttgatagtgcaggtttgaaacactctttttgtagaaactgcaagtggataactgcacttctttgaggcctatcgtagtaaaggaaataacttcctataaaaacaagacagaagctttctcagaaaattctctgggatgattgagttgaactcaccagagcagtactttccttgggatggagtagtttcgaaacacactttctgtagaatctgcaagtggatatttggacctgtctgaggaattcgttgcaaacgggataatttcagctaagtaaacagaagcagtctcagaatcttcttgtgatgtttgcattcaaatcccagaattgaaccttcctttgaaagttcaggttggaaacactctttttgcaggatctacaagtggatattcggaccactctgtggacttcgttcgaaacgggtatatcttcacataacatctagacagaagcattctcagaaacttttctgtgatgactgcattcaactcacagagttgaacactgcttttgagagcgcagttttgaaactctctttctctggaatctgcaaggggacatgcagacctctttgaaggtttcgttggaaacggaatcatcttcacataaaaattacacagaagcatcctcaggaactccttggtgatgtttgtattcaacttccagagttgaactttccttcggaaagagcagctatgaaacactctttttctagaatctgcaagtggacattgggagggctgtgaggtttgtggtggaaaaggaaatatctccacataaatactagatagaagccttctcagaaactactttgtgatgattgcattcacctcacggagttgagcattcctattgacagagcagtttggaaacactcttgttgtagaataggctagtggagatttggagcgctttgaggcctatggtagtaaagggaagagcttcacataaaatctagacagaagcattctcagaaaatactttgtgatgattgagtttaacacacagagctgaacattactttggatggagcaggtttgaaacacactttctatagaatctgcgagtggatatttggacctctctgaggatttcgttggaaacgggataactgcacctaactaaacggaagcattctcacaaaattcttcgtgatgtttgcattcaaatcccagagttgaaccttcctttgatagttcagctttgaaacactctttttgtaggatctgcaagtggatatttggaccacactttggccttccttcgaaacgggtacatcttcatataaaatctagacagaagccttctcagaaacttctctgtgatgattgcattcaactcaaggcgttgaaccctcctatggatagggcagttttgaatctctctttttgtggaatctgcaagtgtatatgtggtcctctttgaagatgtctttggaaacgggaatatcttcacataaaaactaaacagaagcattctcagaaacttctctgtgatgtttgtgtccaaatcacagagtttcacgttgcttttcatagagcagatgagaaacatgcttttcgtagggtctgcaagtggacatttggagagatttcaagcctgtggtggaaaacgaattatcgtcacgtaaaaactagagggaagcattgtcagaaacttgtttgtgatgactgcattcaactcacagagttgaaggttccttttcaaacagcagtttccaaacactctttctgtggcatctgcaagtggatgtttgggcctctttgaagatttcgttggaaacgggataatcttcacagaaaagctaaacagaagcattctcagaaacttctttgtgatgtttgctttcaactcacagagttgaacattccttttgagagagaagctttgaaacactctttttctagaatctgcaagtggatatttggagggctttgaggcctgaggtggaaaaggaattatcttcccgtaagaactagatagatgcattctcagaaactactttgtgacgattgcattcaagtcacagaggtgaacattccctttcacagagcactttggaaactctcgttgtgtagaatctgcaagtggagatatggaccgctttgaggcctatggtagtaaaggaaacagcttcatataaaaactagacagcagcattctcagaaaactctttgtgacgactgagtttaactcaaagggctgaacattcctttcgatggagcagtttggaaacacactatctctaggatctgcaagcggatacttgggcctctctgaggatttcgttggaaacgggataaaccgcacagaactaaacagaagcattctcagaaccttcttcgtgacgtttgcattcaacccacagtgttgaacctttctttgatagttcaggtttgaaacactctttttgtagaaactgcaagtggataactgcacttctttgaggcctatcgtagtaaaggaaataacttcccataaaaacaagacagaagctttctcagaaaattctctgggatgattgagttgaactcacagagcagtactttccttgggatggagtagtttcgaaacacactttctgtagaatctgcaagtggatatttggacctgtctgaggaattcgttgcaaacgggataatttcagctaagtaaacagaatcagtctcagaatcttcttgtgatgtttgcattcaaatcccagaattgaaccttcctttgaaagttcaggctggaaacactctttttgcagggtctacaagtggatattcggtccactctgtggacttcgttcgaaacgggtatatcttcacataacatctagacagaagcattctcagaaacttttctgtgatgactgcattcaactcacagagttgaacactccttttgagagcgcagttttgaaactctctttctctggaatctgcaaggggacatgcagacgtctttgaaggtttcgttggaaacggaatcatctccacataaaaattacacagaagcattctcaggaactccttggtgatgtttgtattcaacttccagagttgaactttccttcggaaagagcagctatgaaacactctttttctagaatctgcaagtggacattgggagggctgtgaggtttgtggtggaaatggaaatatctccacataaatactagatagaagccttctcagaaactactttgtgatgattgcattcacctcacagagtggagcattcctattgacagagcagtttggaaacactcttcttgtagaatctcctagtggaggtttggagcgctttgaggcctatggtagtaaagggaagagcttcacataaaatctagacagaagcattctcagaaaatactttgtgatgattgagtttaacacacagagctgaacattacctttgcgatggagcaggtttgaaacacactttctatagaatctgcgagtggatatttggacctctctgaggatttcgttggaaacgggataactgcacctaactaaatggaagcattctcacaaaattctttgtgatgtttgcattcaaatcccagagttgaaccttcctttgatagttcagctttgaaacattctttttgtaggttctgcaagtggatatttggacgactctttggccttcgttcgaaacgggtacatcttcaaatgaaaactagacagaagccttctcagaaacttctctgtgacgattgcattcaactcaaagagttgaaccctcctatggatagagcagttttgaatctctctttttgtggaatctgcaagtggatatgtggtcctctttgaagatgtctttggaaacgggaatatcttcacattaaaactaaacagaagcattctcagaaacttctctgtgatgtttgtcttcaactcacagagttttacgttgcttttcatagagcagatgagaaacatgcttttcgtagggtctgcaagtggacatttggagagctttcaggcctgtggtggaaaacgaattatcgtcacgtaaaaactagagagaagcattgtcagaaacttgtttgtgatgactgcattcaactcacagagttgaaggttccttttcaaacagcagtttccaaacactctttctgtggcatctgcagtggatgtttgggcctctttgaagatttcgttggaaacgggataatcttcacagaaaagctaaacagaagcattctcagaaacttctttgtgatgtttgctttcaactcacagagttgaactttccttttgagagagaagctttgaaacactctttttctagaatctgcaagtggatatttggagggctttgaggcctgaggtggaaaaggaattatcttcccgtaagaactaggtagatgcattctcagaaactactttgtgacgattgcattcaagtcacagaggtgaacattccctttcagagagcactttggaaactctcgttgtgtagaatctgcaagtggagatatggactgctttgaggcctatggtagtaaaggaaacagcttcatataaaaactagacagctagcattctcagcaaaactctttgtgacgactgagtttaactcacagggctgaacattcctttggatggagcagtttcgaaacacactacttgtagaatctgccagtggatatttgggcctctctgaggatttcgctggaaacgggataaaccgcacagaaataaacagaagcattctcagaacattcttcgtgatgtttgcgttcaactcacagcgttgaacctttccttgatacttcgggtttgaaacactctttttgtagaaactgcaagtggataattgcacttctttgaggcctatcctagtaaaggaaataacttcatataaaaacaagacagaagctttctcagaaaattctctgggatgattgagttgaactcacagagcagtactttccttgggatggagtagtttcgaaacacactttctgtagaatctgcaagtggatatttggacctgtctgaggaattcgttgcaaacgggataatttcagctaagtaaacagaagcaatctcagaatcttcttgtgatgtttgccttcaaatcccagaattgaaccttcctttgaaagttcaggttggaaacactctttctgcaggatctacaagtggatattcggaccactctgtggacttcgttcgaaacgggtatatcttcacataacatctagacagaagcattctcagaaacttttctgtgatgactgcattcaactcacagagttgaacactccttttgagagcgcagttttgaaactctctttctctggaatctgcaaggggacttgcagacctctttgaaggtttcgttggaaacggaatcatcttcacataaaaattacacagaagcatcttcaggaactccttggtgatgtttgtattcaacttccagagttgaactttccttcggaaagagcagctatgaaacactctttttctagaatctgcaagtggacattgggagggctgtgaggtttgtggtggaaaaggaaatatctccacataaatactagatagaagccttctcagaaactactttgtgatgattgcattcacctcacggagtggagcattcctattgacagagcagtttggaaacactcttgttgtagaatctgctagtggagatttggagcgctttgaggcctatggtagtaaagggaagagcttcacataaaatcaagacagaagcattctcagaaactactttgtgatgattgagtttaacacacagagctgaacattcctttggatggagcaggtttgaaacacactttctgtagaatctgcgagtggatatttggacctctctgaggatttcgttggaaacgggataactgcacctaactaaacggaagcattctcacaaaattcttcgtgatgtttgctttcaaatcccagagttgaaccttcctttgatagttcaggtttgaaacactctttttgtaggatctgcaagtggatatttggaccactctttggccttccttcgaaacgggtacatcttcatataaaatctagacagaagccttctcagaaacttctctgtggtgattgcgttcaactcacagagttgaacgctcctatggataaagcagttttgaatctctctttttgtggaatctgcaagtggatatgtgaacctctttgaagatgtctttggaaacgggaatatcttcacataaaaactaaacagaagcattctcagaaacttctctgtgatgtttgcgttcaactcacagagtttcacattgcttttcatagagcagttctgaaacatgcttttcggaatatctgcaagtggacatttggagagctttcaggcctgtggtggaaaacgaattatcgtcacataaaaactagagagtagcattgtcagaaacttgtttgtgatgactgcattcaactcacagagttgaaggttccttttcaaacagcagtttccaaacactctttctgtggcatctgcaagtggatgtttgggcctctttgaagatttcgttggaaacgggataatcttcacagaaaagctaaacagaagcattctcagaaacttctttgtgatgtttgctttcaactcacagagttgaactttccttttgagagagaagctttgaaacactctttttctagaatctgcaagtggatatttggagggctttgaggcctgaggtggaaaaggaattatcttcccgtaagaactagatagatgcattctcagaaactactttgtgacgattgcattcaagtcacagaggtgaacattccctttcagagagcactttggaaactctcgttgtgtagaatctgcaagtggagatatggaccgctttgaggcctatggtagtaaaggaaacagcttcatataaaaactagacagcagcattctcagaaaactctttgtgacgactgagtttaactcacagggctgaacattcctttggatggagcagtttggaaacacactatctgtaggatctgcaagcggatacttgggcctccctgaggatttcattggaaacgggatacaccgcacagaactaaacagaagcattctcagaaccttcttcgtgacgtttgcattcaacccacagtgttgaacctttctttgatagttcaggttagaaacactctttttgtagaaactgcaagtggataactgcacttctttgaggcctatcgtagtaaaggaaataacttcctataaaaacaagacagaagctttctcagaaaattctctgggatgattgagttgatctcacagagcagtactttccttgggatggagtagtttcgaaacacactttctgtagaatctgcaagtggatatttggacctgtctgaggaattcgttgcaaacgggataatttcagctaagtaaacagaagcagtctcagaatcttcttgtgatgtttgcattcaaatcccagaattgaaccttcctttgaaagttcaggttggaaacactctttttgcaggatctacaagtggatattcggaccactctgtggacttcgttcgaaacgggtatatcttcacataacatctagacagaagcattctcagaaacttttctgtgatgactgcattcaactcacagagttgaacactccttttgagagcgcagttttgaaactctctttctctggaatctgcaaggggacatgcagacctctttgaaggtttcgttggaaacggaatcatcttcacataaaaattacacagaagcattctcaggaactccttggtgatgtttgtattcaacttccagagttgaactttccttcggaaagagcagctatgaaacactctttttctagaatctgcaagtggacattgggagggctgtgaggtttgtggtggaaaaggaaatatctccacataaatactagatagaagccttctcagaaactactttgtgatgattgcattcacctcacggagtggagcattcctattgacagagcagtttggaaacactcttgttgtagaatctgctagtggagatttggagcgctttgaggactatggtagtaaagggaagagcttcacataaaatcaagacagaagcattctcagaaaatactttgtgatgattgagtttaacacacagagctgaacattactttggatggagcaggtttgaaacacactttctatagaatctgcgagtggatatttggacctctctgaggatttcgttggaaacgggataactgcacctaactaaacggaagcattctcacaaaattcttcgtgaggtttgcattcaaatcccagagttgaaacttcctttgatagttcaggtttgaaacactctttttgtaggatctgcaagtggatatttggaccactctttggccttccttcgaaacgggtacatcttcaaataaaatctagacagaagccttctcagaaacttctctgtgatgattgcattcaactcaaagcgatgaaccctcctatggatagagcagttttgaatctctctttttgtggaatctgcaagtggatatgtggtcctctttgaagatgtctttggaaacgggaatatcttcacataaaaactaaactgaagcattctcagaaacttctctgtgatgtttgtgttcaactcacagagtttcacgttgcttttcatagagcagatgagaaacatgcttttcgtagggtctgcaagtggacatttggagagcttacaggcctgtggtggaaaacgaattatcgtcacgtaaaaactagagagaagcattgtcagaaacttgtttgtgatgactgcattcaactcacagagttgaaggttccttttcaaacagcagtttccaaacactctttctgtggcatctgcaagtggatgtttgggcctctttgaagatttcgttggaaacgggatactcttcacagaaaagctaaacagatgcattctcagaaacttctttgtgatgtttgctttcaactcacagagttgaactttccttttgagagagaagctttgaaacactctttttctagaatctgcaagtggatatttggagggctttgaggcctgtggtggaaaaggaattatcttcccgtaagaactagatagatgcattctcagaaactactttgtgacgattgcattcaagtcacggaggtgaacattccctttcagagagcactttggaaactctcgttgtgtagaatctgcaagtggagatatggaccgctttgaggcctatggtagtaaaggaaacaacttcatataaaaactagacagcagcattctcagaaaactctttgtgacgactgagttaaactcacagggctgaacattcctttggatggagcagtttggaaacacactatctgtaggatctgcaagcggatacttgggcctccctgaggatttcgtgggaaacgggataaaccgcacagaactaaacagaagcattctcagaaccttcttcgtgatgtttgcattcaacccacagtgttgaacctttctttgatagttcaggtttgaaacactctttttgtagaaactgcaagtggataactgcacttctttgaggcctatcgtaataaaggaaataacttcctataaaaacaagacagaagctttctcagaaaattctctgggatgattgagttgaactcacagagcagtactttccttgggatggagtagtttcgaaacacactttctgtagaatctgcaagtggatatttggacctgtctgaggaattcgttgcaaacgggataatttcagctaagtaaacagaagcagtctcagaatcttcttgtgatgtttgcattcaaatcccagaatggaaccttcctttgaaagttcaggttggaaacactctttttgcaggatctacaagtggatattcggaccactctgtggacttcgtttgaaacgggtatatcttcacataacatctagacagaagcattctcagaaacttttctgtgatgactgcattcaactcacagagttgaacactccttttgagagcgcagttttgaaactctctttctctggaatctgcaaggggacatgcagacctctttgaaggtttcgttggaaacggaatcatcttcacataaaaattacacggaagcatcctcaggaactccttggtgatgtttgtattcaacttccagagttgaactttcctttggaaagagcagctatgaaacactctttttctagaatctgcaagtggacattgggagggctgtgaggtttgtggtggaaaaggaaatatctccacataaatactagatagaagccttctcagaaactactttgtgatgattgcattcacctcacggagttgagcattcctattgacagatcagtttggaaacactcttcttgtagaatcggctagtggagatttggagcgctttgaggcctatggtggtaaagggaagagcttcacataaaatctagacagaagcattctcagaaaatactttgtgatgattgagtttaacacacagagctgaacattcctttggatggagaaggtttgaaacacactttctgtagaatctgcgagtggatatttggacctctctgaggatttcgttggaaacgggataactgcacctaactaaacggaagcattctcacaaaattctttgtgatgtttgcattcaaatcccagagttgaaccttcctttgatagttcagctttgaaacactctttttgtaggttctgcaggtggatatttggaccactctttggccttcgttcgaaacgggtacatcttcaaataaaatctagacagaagccttctcagaaacttctctgtgacgattgcattcaacccaaagagttgaaccctcctatggatagagcagttttgaatctctctttttgtggaatctgcaagtggatatgtggtcctctttgaagatgtctttggaaacgggaatatcttcacataaaaactaaacagaagcattctcagaaacttctctgtgatgtttgtgttcaactcacagagtttcacgttgcttttcatagagcagatgagaaacatgcttttcgtagggtctgcaagtggacatttggagagctttcaggcctgtggtggaaaacgaattatcgtcacgtaaaaactagagagaagcattgtcagaaacttgtttgtgatgactgcattcaactcacagagttgaaggttccttttcaaacagcagtttccaaacactctttctgtggcatctgcaagtggatgtttgggcctctttgaagatttcgttggaaacgggataatcttcacagaaaagctaaacagaagcattctcagaaacttctttgtgatgtttgctttcaactcacagagttgaactttccttttgagagagaagctttgaaacactctttttctagaatctgcaagtggatatttggagggctttgaggcctgaggtggaacaggaattatcttcccgtaagaactagatagatgcattctcagaaacttctttgtgacgattgcattcaagtcacagaggtgaacattccctttcacagagcactttggaaactctcgttgtgtagaatcttcaagtggagatatggaccgctttgaggcctatggtagtaaaggaaacagcttcatataaaaactagacagcagcattctcagaaaactctttgtgacgactgagtttaactcacagggctgaacattcctttggatggagcagtttggaaacacactatctgtaggatctgcaagcggatacttgggcctctctgaggatttcgttggaaacggaataaaccgcacagaactaaacagaagcattctcagaaccttcttcgtgatgtttgcattcaacccacagtgttgaacctttctttgatagttcaggtttgaaacactctttttgtagaaactgcaagtggataactgcacttctttgaggcctatcgtagtaaaggaaataacttcctataaaaacaagacagaagctttctcagaaaaattctctgggatgattgagttgaactcacagagcagtactttccttgggatggagtagtttcgaaacacactttctgtagaatctgcaagtggatatttggacctgtctgaggaattcgttgcaaacgggataatttcagctaagtaaacagaagcagtctcagaatcttcttgtgatgtttgcattcaaatcccagaatggaaccttcctttgaaagttcaggttggaaacactctttttgcaggatctacaagtggatattcggaccactctgtggacttcgttcgaaacgggtatatcttcacataacatctagacagaagcattctcagaaacttttctgtgatgactgcattcaactcacagagttgaacactccttttgagagcgcagttttgaaactctctttctctggaatctgcaaggggacatgcagacctctttgaaggtttcgttggaaacggaatcatcttcacataaaaattacacggaagcatcctcaggaactccttggtgatgtttgtattcaacttccagagttgaactttccttcggaaagagcagctataaaacacactttttctagaatctgcaagtggacattgggagggctgtgaggtttgtgatggaaaaggaaatatctccacataaatactagatagaagccttctcagaaactactttgtgatgattgcattcacctcacggagtggagcattcctattgacagagcagtttggaaacactcttcttgtagaatcggctagtggagatttggagcgctttgaggcctatggtagtaaagggaagagcttcacataaaatctagacagaagcattctcagaaaatactttgtgatgattgagtttaacacacagagctgaacattcctttggatggagaaggttggaaccacactttctgtagaatctgcgagtggatatttggacctctctgaggatttcgttggaaacgggataactgcacctaaataaacggaatcattctcacaaaattctttgtgatgtttgcattcaaatcccagagttgaaccttcctttgatagttcagctttgaaacagtctttttgtaggatctgcaggtggatatttggaccactctttggccttcattcgaaacgggtacatcttcaaataaaatctagacagaagccttctcagaaacttctctgtgacgattgcattcaactgaaagcgttgaaccctcctatggatagagcagttttgaatctctctttttgtggaatctgcaagtggatatgtggtcctctttgaagatgtctttggaaacgggaatatcttcacataaaaactaaacagaagcattctcagaaacttctctgtgatgtttgtgttcaactcacagagtttcacgttgcttttcatagagcagatgagaaacatgcttttcgtagggtctgcaagtggacatttggagagatttcaggcctgtggtggaaaacgaattatcgtcacgtaaaaacagagagaagcattgtcagaaacttgtttgtgatgactgcattcaactcacagagttgaaggttccttttcaaacagcagtttccaaacactctttctgtggcatctgcaagtggatgtttgggcctctttgaagatttcgttggaaacgggataatcttcacagaaaagctaaacagaagcattctcagaaacttctttgtgatgtttgctttcaactcacagagttgaactttccttttgagagagaagctttgaaacactctttttctagaatctgcaagtggatatttggagggctttgaggcctgaggtggaaaaggaattatcttcccgtcagaactagatagatgcattctcagaaactactttgtgacgattgcattcaagtcacagaggtgaacattccctttcagagagcactttggaaactctcgttgtgtagaatctgcaagtggagatatggaccgctttgaggcctatggtagtaaaggaaacagcttcatataaaaactagacagcagcattctcagaaaactctttgtgacgactgagtttaactcacagggctgaacattcctttggatggagcagtttggaaacacactatctgtaggatctgcaagcggatacttgggcctccctgaggatttcgttggaaacgggataaactgcacagaactaaacagaagcattctcagaaccttcttcgtgatgtttgcattcaacccacagtgttgaacctttctttgatagttcaggtttgaaacactctttttgtagaaactgcaagtggataactgcacttctttgaggcctatcgtagtaaaggaaataacttcctataaaaacaagacagaagttttctcagaaaattctctgcgatgattgagttgaactcacagagcagtactttccttgggatggagtagtttcgaaacacactttctgtagaatctgcaagtggatatttggacctgtctgaggaattcgttgcaaacgggataatttcagctaagtaaacagaagcagtctcagaatcttcttgtgatgtttgcattcaaatcccagaattgaaccttcctttgaaagttcaggttggaaacactctttttgcaggatctacaagtggatattcggaccactctgtggacttcgttcgaaacgggtatatcttcacataacatctagacagaagcattctcagaaacttttctgtgatgactgcattcaactcacagagttgaacactccttttgagagcgcagttttgaaactctctttctctggaatctgcaaggggacatgcagacctctttgaaggtttcgttggaaacggaatcatcttcacataaaaattacacagaagcatcttcaggaactccttggtgatgtttgtattcaacttccagagttgaactttccttcggaaagagcagctatgaaacactctttttctagaatctgcaagtggacattgggagggctgtgaggtttgtggtggaaaaggaaatatctccacataaatactagatagaagccttctcagaaactcctttgtgatgattgcattcacctcacggagtggagcattcctattgacagagcagtttggaaacactcttgttttagaatctgctagtggagatttggagcgctttgaggcctatggtagtaaagggaagagcttcacataaaatctagacagaagcattctcagaaaatactttgtgatgattgagtttaacacacagagctgaacattcctttggatggagaaggtttgaaacacactttctgtagaatctgcgagtggatatttggacctctctgaggatttcgttggaaacgggataactgcacctaacaaaacggaagcattctcacaaaattccttgtgatgtttgcattcaaatcccagagttgaaccttcctttgatagttcagctttgaaacactctttttgtaggatctgctggtggatatttggaccactctttggccttcgttcgaaacgggtacatcttcaaataaaatctagacagaagccttctcagaaacttctctgtgacgattgcattcaactcaaagagttgaaccctcctatggatagagcagtttttaatctctctttttgtggaatctgcaagtggatatgtggtcctctttgaagatgtctttggaaacgggaatatcttcacataaaaactaaacagaagcattctcagaaacttctctgtgatgtttgtgttcaactcacagagtttcacgttgcttttcatagagcagatgagaaacatgcttttcgtagggtctgcaagtggacatttggagagatttcaggcctgtggtggaaaacgaattatcgtcacgtaaaaactagagagaggcattgtcagaaacttgtttgtgatgactgcattcaactcacagagttgaaggttccttttcaaacagcagtttccaaacactctttctgtggcatctgcaagtggatgtttgggcctctttgaagatttcgttggaaacgggatactcttcacagaaaagctaaacagaagcattctcagaaacttctttgtgatgtttgctttcaactcacagagttgaactttccttttgagagagaagctttgaaacactctttttctagaatctgcaagtggatatttggaggtctttgaggcctgtggtggaaaaggaattatcttcccgtaagaactagatagatgcattctcagaaactactttgtgacgattgcattcaagtcacggaggtgaacattccctttcagagagcactttggaaactctcgttgtgtagaatctgcaagtggagatatggaccgctttgaggcctatggtagtaaaggaaacaacttcatataaaaactagacagcagcattctcagaaaactctttgtgacgactgagtttaactcacagggctgaacattcctttggatggagcagtttggaaacacactatctgtaggatctgcaagcggatacttgggcctctctgaggatttcgttggaaacggaataaaccgcacagaactaaacagaagcattctcagaaccttcttcgtgatgtttgcattcaacccacagtgttgaacctttctttgatagttcaggtttgaaacactctttttgtagaaactgcaagtggataactgcacttctttgaggcctatcgtagtaaaggaaataacttcctataaaaacaagacagaagctttctcagaaaattctctgggatgattgagttgaactcacagagcagtactttccttgggatggagtagtttcgaaacacactttctgtagaatctgcaagtggatatttggacctgtctgaggaattcgttgcaaacgggataatttcagctaagtaaacagaagcagtctcagaatcttcctgtgatgtttgcattcaaatcccagaattgaaccttcctttgaaagttcaggttggaaacactctttttgcaggatctacaagtggatattcggaccactctgtggacttcgttcgaaacgggtatatcttcacataacatctagacagaagcattctcagaaacttttctgtgatgactgcattcaactcacagagttcaacactccttttgagagcgcagtttggaaactctctttctctggaatctgcaaggggacatgcagacctctttgaaggtttcgttggaaacggaatcatcttcacataaaaattacacagaatcatcctcaggaactccttggtgatgtttgtattcaacttccagagttgaactttccttcggaaagagcagctatgaaacactctttttctagaatctgcaagtggacattgggagggctgtgaggtttgtggtggaaaaggaaatatctccacataaatactagatagaagccttctcagaaactactttgtgatgattgcattcacctcacggagtggagcattcctattgacagagcagtttggaaacactcttgttgtagaatctgctagtggagatttggagcgctttgaggcctatggtagtaaagggaagagcttcacataaaatctagacagaagcattctcagaaaatactttgtgatgattgagtttaacacacagagctgaacattcctttggatggagaaggtttgaaacacactttctgtagaatctgcgagtggatatttggacctctctgaggatttcgttggaaacgggataactgcacctaactaaacggaagcattctcacaaaattctttgtgatgtttgcattcaaatcccagagttgacccttcctttgatagttcagctttgaaacactctttttgtaggatctgcaagtggatatttggaccactctttggccttcgttcgaaacgggtacatcttcaaataaaatctagacagaagccttctcagaaacttctctgtgacgattgcattcaactcaaagcgttgaaccctcctatggatagagcagttttgaatctctctttttgtggaatctgcaagtggatatgtggtcctctttaaagatgtcattggaaacgggaacatcttcacataaaaactaaacagaagcattctcagaaacttctctgtgatgtttgtgttcaactcacagagtttcacgttgctattcatagagcagatgagaaacatgcttttcgtagggtctgcaagtggacatttcaagagatttccggcctgcggtggaaaacgaattatcgtcacgtaaaaactagagagaagcattgtcagaaacttgtttgtgatgactgcattcaactcacagagttgaaggttccttttcaaacagcagtttccaaacactctttctgtggcatctgcaagtggatgtttgggcctctttgaagatttcgttggaaacgggataatcttcacagaaaagctaaacagaagcattctcagaaacttctttgtgatgtttgctttcaactcacagagttgaactttccttttgagagagaagctttgaaacactctttttctagaatctgcaagtggatatttggagggctttgaggcctgaggtggaaaaggaattatcttcccgtaagaactagatagatgcattctcagaaactactttgtgacgattgcattcaagtcacagaggtgaacattccctttcacagagcactttggaaactctcgttgtgtagaatctgcaagtggagatatggaccgctttgaggcctatggtagtaaaggaaacagcttcatataaaaactagacagcagcattctcagaaaactctttgtgacgactgagtttaactcacagggctgaacattcctttggatggagcagtatggaaacacactatctgtaggatctgcaagcggatacttgggcctccctgaggatttcgttggaaacgggataaaccgcacagaactaaacagaagcattctcagaaccttcttcgtgatgtttgcattcaacccacagtgttgaacctttctttgatagttcaggtttgaaacactctttttgtagaaactgcaagtggataactgcacttctttgaggcctatcgtagtaaaggaaataacttcctataaaaacaagacagaagctttctcagaaaattctctgggatgattgagttgaactcacagagcagtactttctttgggatggagtagtttcgaaacacactttctgtacaatctgcaagtggatatttggacctgtctgaggaattcgttgcaaacgggataatttcagctaagtaaacagaagcagtctcagaaacttcttgtgatgtttgcattcaaatcccagaattgaaccttcctttgaaagttcaggttggaaacactctttttgcaggatctacaagtggatattcggaccactctgtggacttcgttcgatacgggtatatcttcacataacatctagacagaagcattctcagaaacttttctgtgatgactgcattcaactcacagagttgaacactccttttgagagcgcagttttgaaagtctctttctctggaatctgcaaggggacatgcagacctctttgaaggtttcgttggaaacagaatcatcttcacataaaaattacacagaggcatcctcaggaactccttggtgatgtttgtattcaacttccagagttgaactttccttcggaaagagcagctatgaaacactctttttctagaatctgcaagtggacattgggagggctgtgaggtttgtggtggaaaaggaaatatctccacataaatactagatagaagccttctcagaaactactttgtgatgattgcattcacctcacggagtggagcattcctattgacagagcagtttggaaaaactcttgttgtagaatctcctagtggagatttggagcgctttgaggcctacggtagtaaagggaagagcttcacataaaatctagacagaagcattctcagaaaatactttgtgatgattgagtttaacacacagagctgaacattcctttggatggagaaggtttgaaacacactttctgtagaatctgcgagtggatatttggacctctctgaggatttcgttggaaacgggataactgcacctaactaaacggaagcattctcacaaaattctttgtgatgtttgcattcaaatcccagagttgaaccttcctttgatagttcagctttgaaacactctttttgtaggctctgcaggtggatatttggaccactctttggccttcgttcaaaacgggtacatcttcaaataaaatctagacagaagccttctcagaaacttctctgtgacgattgcattcaactcaaagcgttgaaacctcctatggatcgagcagttttgaatctctctttttgtggaatctgcaagtggatatgtggtcctctttgaagatgtctttggaaacgggaatatcttcacataaaaactaaacagaagcattctcagaaacttctctgtgatgtttgtgttcaactcacagagtttcacgttgcttttcatagagcagatgagaaacatgcttttcgtagggtctgcaagtggacatttggagagatttccggcctgtggtggaaaacgaattatcgtcacgtaaaaactagagagaagcattgtcagaaacttgtttgtgatgactgcattcaactcacagagttgaaggttccttttcaaacagcagtttccaaacactctttctgtggcatctgcaagtggatgtttgggcctctttgaagatttcgttggaaacgggatactcttcacagaaaagctaaacagaagcattctcagaaacttctttgtgatgtttgctttcaactcacagagttgaactttccttttgagagagaagctttgaaacactctttttctagaatctgcaagtggatatttgcagggctttgaggcctgtggtggaaaaggaattatcttcccgtaagaactagatagatgcattctcagaaactactttgtgacgattgcattcaagtcacggaggtgaacattccctttcagagagcactttggaaactctcgttgtgtagaatctgcaagtggagatatggaccgctttgaggcctatggtagtaaaggaaacaacttcatataaaaactagacagcagcattctcagaaaactctttgtgacgactgagtttaactcacagggctgaacattcctttggatggagcagtttggaaacacactatctgtaggatctgcaagcggatatttgggcctccctgaggatttcgttggaaacgggataaaccgcaccgaactaaacagaagcattctcagaaccttcttcgtgatgtttgcattcaacccacagtgttgaacctttctttgatagttcaggtttgaaacactctttttgtagaaactgcaagtggataactgcacttctttgaggcctatcgtagtaaaggaaataacttcctataaaaacaagacagaagctttctcagaaaattctctgggatgattgagttgaacacacagagcagtactttccttggaatggagtagtttcgaaacacactttctgtagaatctgcaagtggatatttggacctgtctgaggaattcgttgcaaacgggataatttcagctaagtaaacagaagcagtctcagaatcttcttgtgatgtttgcattcaaatcccagaattgaaccttcctttgaaagttcaggttggaaacactctttttgcaggatctacaagtggatattcggaccactctgtggacttcgttcgaaacgggtaaatcttcacataacatctagacagaagcattctcagaaacttttctgtgatgactgcattccactcacagagttgaactctccttttgaaagcgcagttttgaaactctctttctctggaatctgcaaggggacatgcagacctctttgaaggtttcgttggaaacggaatcatcttcacataaaaattacacagaagcatcttcaggaactccttggtgatgtttgtattcaacttccagagttgaactttccttcggaaagagcagctatgaaacactctttttctagaatctgcaagtggacattgggagggctgtgaggtttgtggtggaaaaggaaatatctccacataaatactagatagaagccttctcagaaactactttgtgatgattgcattcacctcacggagtggagcattcctattgacagagcagtttggaaacactcttcttgtagaatcggctagtggaggtttggagcgctttgaggcctatggtagtaaagggaagagcttcacatgaaatctagacagaagcattctcagaaaatactttgtgatgattgagtttaacacacagagctgaacattcctttggatggagaaggtttgaaacacactttctgtagaatctgcgagtttatatttggacctctctgaggatttcgttggaaacgggataactgcacctaactaaacggaagcattctcacaaaattcttcgtgatgtttgcattcaaatcccagagttgaacgttcctttgatagttcagctttgaaacaccctttttgtaggatctgcaagtggatatttggaccactctttggccttcgttctaaacgggtacatcttcaaataaaatttagacagaagccttctccgaaacttctctgtgacgattgcattcaactccaagcgttgaaccctcctatggatagagcagttttgaatctctcttttcgtggaatcggcaagtggatatgtggtcctctttgaagatatctttggaaacgggaatatgtacacataaaaactaaacagaagcattctcagaaacttctctgtgatgtttgtgttcaactcacagagtttcacgttgcttttcatagagcagatgagaaacatgcttttcgtagggtctgcaagtggacatttggagagatttcaggcctgtggtggaaaacgaattatcgtcacgtaaaaactagagagaagcattgtcagaaacttgtttgtgatgactgcattcaactcacagagttgaaggttccttttcaaacagcagtttccaaacactctttctgtggcatctgcaagtggatgtttgggcctctttgaagatttcgttggaaacgggataatcttcacagaaaagctaaacagaagcattctcagaaacttctttgtgatgtttgctttcaactcacagagttgaactttccttttgagagagaagctttgaaacactctttttctagaatctgcaagtggatatttggagggctttgaggcctgaggtggaaaaggaattatcttcccgtaagagctagatagatgcattctcagaaactactttgtgacgattgcattcaagtcacagaggtgaacattccctttcagagagcactttggaaactctcgttgtgtagaatctgcaagtggagatatggaccgctttgaggcctatggtagtaaaggaaacagcttcatataaaaactagacagcagcattctcagaaaactctttgtgacgactgagtttaactcacagggctgaacattcctttggatggagcagtttggaaacacactatctgtaggatctgcaagcggatacttgggcctaccctgaggatttcgttggaaacgggataaaccgcacagaactaaacagaagcattctcagaaccttcttcgtgatgtttgcattcaacccacagtgttgaacctttctttgatagttcaggtttgaaacactctttttgtagaaactgcaagtggataactgcacttctttgaggcctatcgtagtaaaggaaataacttcctataaaaacaagacagaagctttctcagaaaattatctgggatgattgagttgaactcacagagcagtactttccttgggattgagtagtttcgaaacacactttctgtagaatctgcaagtgggtatttggacctgtctgaggaattcgttgcaaacgggataatttcagcaaagtaaaaagaagcagtctcagaatcttcttgtgatgtttgcattcaaatcccagaattgaaccttcctttgaaagttcaggttggaaacactctttttgcaggatctacaagtggatattcggaccactctgtggacttcgttcgaaacgggtatatcttcacataacatctagacagaagcattctcagaaacttttctgtgatgactgcattcaactcacagagttgaacactccttttgagagcgcagttttgaaactctctttctctggaatctgcaaggggacatgcagacctctttgaaggtttcgttggaaacggaatcatcttcacataaaaattacacagaagcatcctcaggaactccttggtgatgtttgtattcaacttccagagttgaactttccttcggaaagagcagctatgaaacactctttttctagaatctgcaagtggacattaggagggctgtgaggtttgtggtggaaaaggaaatatctccacataaatactagatagaagccttctcagaaactactttgtgatgactgcattcacctcacggagtggagcattcctattgacagagcagtttggaaacactcttcttgtagaatcggctagtggagatttggagcgctttgaggcctatggtagtaaagggaagagcttcacataaaatctagacagaagcattctcagaaaatactttgtgatgattgagattaacacacagagctgaacattcctttggatggagaaggtttgaaacacactttctgtagaatctgcgagtggatatttggacctctctgaggatttcgttggaaacgggataactgcacctaactaaacggaagcattctcacaaaattctttgtgatatttgcattcaaatcccagagttgaaccttcctttgatagttcagctttggaacactctttttgtaggatctgcaggtggatatttggaccactctttggccttcgttcaaaacgggtacatcttcaaataaaatctagacagaagccttctcagaaacttctctgtgacgattgcattcaactcaaagcgttgaaccctcctatggatagagcagttttgaatctctctttttgtggaatctgcaagtggatatgtggtcctctttgaagatgtctttggaaacgggaatatcttcacataaaaactaaacagaagcattctcagaaacttctctgtgatgtttgtgttcaactcacagagtttcacgttgcttttcatagagcagatgagaaacatgcttttcgtaaggtctgcaagtggacatttggagagatttcaggcctgtggtggaaaacgaattatcgtcacgtaaaaactagagagaagcattgtcagaaacttgtttgtgatgactgcattcaactcacagagttgaaggttccttttcaaacagcagtttccaaacactctttctgtggcatctgcaagtggatgtttgggcctctttgaagatttcgttggaaacgggataatcttcacagaaaagctaaacagaagcattctcagaaacttctttgtgatgtttgctttcaactcacagagttgaactttccttttgagagagaagctttgaaacactctttttctagaatctgcaagtggatatttggagggctttgaggcctgaggtggaaaaggaattatcttcccgtaagaactagatagatgcattctcagaaactactttgtgacgattgcattcaagtcacagaggtgaacattccctttcagagagcactttggaaactctcgttgtgtagaatctgcaagtggagatatggaccgctttgaggcctatggtagtaaaggaaacagcttcatataaaaactagacagcagcattctcagaaaactctttgtgacgactgagtttaactcacagggctgaacattcctttggatggagcagtttggaaacacactatctgtaggatctgcaagcggatacttgggcctctctgaggattgcgttggaaacgggataaaccgcacagaactaaacagaagcattctcagaaccttcttcgtgatgtttgcattcaacccacagtgttgaacctttctttgatagttcaggtttgaaacactctttttgtagaaactgcaagtggataactgcacttctttgaggcctatcgtagtaaaggaaataacttcctataaaaacaagacagaagctttctcagaaaattctctgggatgattgagttgaactcacagagcagtactttccttgggatggagtagtatcgaaacacactttctgtagaatctgcaagtggatatttggacctgtctgaggaattcgttgcaaacgggataatttcagctaagtaaacagaagcagtctcagaatcttcttgtgatgtttgcattccaatcccagaattgaaccttcctttgaaagttcaggttggaaacactctttttgcaggatctacaagtggatattcggaccactctgtggacttcgttcgaaacgggtatatcttcacataacatctagacagaagcattctcagaaacttttctgtgatgactgcattcaactcacagagttgaacactccttttgagagcgcagttttgaaactctctttctctggaatctgcaaggggacatgcagacctctttgaaggtttcgttggaaacgggaatcatcttcacataaaaattacacagaagcattctcaggaactccttggtgatgtttgtattcaacttccagagttgaactttccttcggaaagagcagctatgaaacactctttttctagaatctgcaagtggacattgggagggctgtgaggtttgtggtggaaaaggaaatatctccacataaatactacatagaagccttctcagaaactactttgtgatgattgcattcacctcacggagtggagcattcctattgaaagagcagtttggaaacactcttgttgtagaatctgctagtggagatttggagcgctttgaggcctatggtagtaaagggaagagcttcacataaaatctagacacaagcattctcagaaaatactttgtgatgattgagtttaacacacagagctgcacattcctttggatggagaaggtttgaaacacactttctgtagaatctgcgagtggatatttggaactctctgaggatttcgttggaaacgggataactgcacctaactaaacggaagcattctcacaaaattctttgtgatgtttgcattcaaatcccagagttgaaccttcctttgatagttcagctttgaaacactctttttgtaggctctgcaggtggatatttggaccactctttggccttcgttcaaaacgggtacatcttcaaataaaatctagacagaagccttctcagaaacttctctgtgacgattgcattcaactcaaagcgttgaaccctcctatggatagagcagttttgaatctctctttttgtggaatctgcaagtggatatgtggtcctctttgaagatgtctttggaaacgggaatatcttcacataaaaactaaacagaagcattctcagaaacttctctgtgatgtttgtgttcaactcacagagtttcacgttgcttttcatagagcagatgagaaacatgcttttcgtagggtctgcaagtggacatttggagagctttcaggcctgtggtggaaaacgaattatcgtcacgtaaaaactagagagaagcattgtcagaaacttgtttgtgatgactgcattcaactcacagagttgaaggttccttttcaaacagcagtttccaaacactctttctgtggcatctgcaagtggatgtttgggcctctttgaagatttcgttggaaacgggataatcttcacagaaaagctaaacagaagcattctcagaaacttctttgtgatgtttgctttcaactcacagagttgaactttccttttgagagagaagctttgaaacactctttttctagaatctgcaagtggatatttggagggctttgaggcctgaggtggaaaaggaattatcttcccgtaagaactagatagatgcattctcagaaagtactttgtgacgattgcattcaagtcacagaggtgaacattccctttcacagagcactttggaaactctcgttgtgtagaatctgcaagtggagatatggaccgctttgaggcctatggtagtaaaggaaacagcttcatataaaaactagacagcagcattctcagaaaactctttgtgacgactgagtttaactcacagggctgaacattcctttggatggagcagtttggaaacacactatctgtaggatctgcaagcggatacttgggcctccctgaggatttcgttggaaacgggataaaccgcacagaactaaacagaagcattctcagaaccttcttcgtgacgtttgcattcaacccacagtgttgaacctttctttgatagttcaggtttgaaacactctttttgtagaaactgcaagtggataactgcacttctttgaggcctatcgtagtaaaggaaataacttcctataaaaacaagacagaagctttctcagaaaattctctgggatgattgagttgaactcacagagcagtactttccttgggatggagtagtttcgaaacacactttctgtagaatctgcaagtggatatttggacctgtctgaggaattcgttgcaaacgggataatttcagctaagtaaacagaagcagtctcagaatcttcctgtgatgtttgcattcaaatcccagaattgaaccttcctttgaaagttcaggttggaaacactctttttgcaggatctacaagtggatattcggaccactctgtggacttcgttcgaaacgggtatatcttcacataacatctagacagaagcattctcagaaacttttctgtgatgactgcattcaactcacagagttgaacactccttttgagagcgcagttttgaaactctctttctctggaatctgcaaggggacatgcagaccttctttgaaggtttcgttggaaacggaatcatcttcacataaaaattacacagaagcattctcaggaactccttggtgatgtttgtattcaacttccagagttgaactttccttcggaaagagcagctatgaaacactctttttctagaatctgcaagtggacattgggagggctgtgaggtttgtggtggaaaaggaaatatctccacataaatactagatagaagccttctcagaaactactttgtgatgattgcattcacctcacggagtggagcattcctattgacagagcagtttggaaacactcttgttgtagaatctgctagtggagatttggagcgctttgaggcctatggtagtaaagggaagagcttcacataaaatctagacagaagcattctgagaaaatactttgtgatgattgagtttaacacacagagctgaacattcctttggatggagcaggtttgaaacacactttctgtagaatctgcgagtggatatttggacctctctgaggatttcgttggaaacgggataactgcacctaactaatcggaagcattctcacaaaattcttcgtgatgtttgctttcaaatcccagagttgaaccttcctttgatagttcaggtttgaaacactctttttgtaggatctgcaagtggatatttggaccactctttggccttccttcgaaacgggtacatcttcaaataaaatctagacagaagccttctcagaaacttctccgtgatgattgcattcaactcaaagcgttgaaccctcctatggatagagcagttttgaatctctctttttgtggaatctgcaagtggatatgtggtcctctttgaagatgtctttggaaacgggaatatcttcacataaaaactaaacagaagcattctcagaaacttgtctgtgatgtttgtgttcaactcacagagtttcacgttgcttttcatagagcagatgagaaacatgcttttcgtagggtctgcaagtggacatttggagagatttcaggcctgtggtggaaaaagaattatcgtcacgtaaaaactagagagaagcattgtcagaaacttgtttgtgatgactgcattcaactcacagagttgaaggttccttttcaaacagcagtttccaaacactctttctgtggcatctgcaagtggatgtttgggcctctttgaagatttcgttggaaacgggatactcttcacagaaaagctaaacagaagcattctcagaaacttctttgtgatgtttgctttcaactcacagagttgaactttccttttgagagagaagctttgaaacactctttttctagaatctgcaagtggatatttggagggctttgaggcctgaggtggaaaaggaattatcttcccgtaagaactagaaagatgcattctcagaaactactttgtgacgattgcattcaagtcacagaggtgaacattccctttcagagagcactttggaaactctcgttgtgtagaatctgcaagtggagatatggaccgctttgaggcctatggtagtaaaggaaacagcttcatataaatactagacagcagcattcccagaaaactctttgtgacgactgagtttaactcacagggctgaacattcctttggatggagcagtttggaaacacactatctgtaggatctgcaagcggatacttgggcctccctgaggatttcgttggaaacgggatacactgcacagaactaaacagaagcattctcaaaaccttcttcgtgatgtttgcattcaacccacagtgttgaacctttctttgatagttcaggtttgaaacactctttttgtagaaactgcaagtggataactgcacttctttgaggcctatcgtagtaaaggaaataacttcctataaaaacaagacagaagctttctcagaaaattctctgggatgattgagttgaactcacagagcagtactttccttgggatggagtagtttcgaaacacactttctgtagaatctgcaagtggatatttggacctgtctgaggaattcgttgcaaacgggataatttcagctaagtaaacagaagcagtctcagaatcttcttgtgatgtttgcattcaaatcccagaattgaaccttcctttgaaagttcaggttggaaacactctttttgcaggatctacaagtggatattcggaccactctgtggacttcgttcgaaatgggtatatcttcacataacatctagacagaagcattctcagaaacttttctgtgatgactgcattcaactcacagagttgaacactccttttgagagcgcagttttgaaactctctttctctggaatctgcaaggggacatgcagacctctttgaaggtttcgttggaaacggaatcatcttcacataaaaattacacagaagcatcctcaggaactccttggtgatgtttgtattcaacttccagagttgaactttccttcggaaagagcagctatgaaacacactttttctagaatctgcaagtggacattgggaaggctgtgaggtttgtggtggaaaaggaaatatctccacataaatactagatagaagccttctcagaaactactttgtgatgattgcattcacctcacggagtggagcattcctattgacagagcagtttggaaacactcttcttgtagaatcggctagtggagatttggagcgctttgaggcctatggtagtaaagggaagagcttcacataaaatctagacagaagcattctcagaaaatactttgtgatgattgagtttaacacacagagctgaacattcctttggatggagaaggtttgaaacacactttctgtagaatctgcgagtggatatttggacctctctgaggatttcgttggaaacgggataactgcacctaactaaacggaagcattctcacaaaattctttgtgatgtttgcattcaaatcccagagttgaaccttcctttgatagttcagctttgaaacactctttttgtaggatctgcaggtggatatttggacaactctttggccttcattcgaaacgggtacatcttcaaataaaatctagacagaagccttctcagaaacttctctgtgacgattgcattcaactcaaagagttgaaccctcctatggatagagcagttttgaatctctctttttgtggaatctgcaagtggatatgtggtcctcattgaagatgtctttggaaacgggaatatcttcacataaaaactaaacagaagcattctcagaaacttctctgtgatgtttgtgttcaactcacagagtttcacgttgcttttcatagagcagatgagaaacatgcttttcgtagggtctgcaagtggacatttggagagatttcagacctgtggtggaaaacgaattatcgtcacgtaaaaactagagagaagcattgtcagaaacttgtttgtgatgactgcattccactcaaagagttgaagattccttttcaaacagcagtttccaaacactctttctgtggcatctgcaagtggatgtttgggcctctttgaagatttcgttggaaacgggataatcttcacagaaaagctaaacagaagcattctcagaaacttctttgtgatgttcgctttcaactcacagagttgaactttccttttgagagagaagctttgaaacactctttttctagaatctgcaagtggatatttggagggctttgaggcctgtggtggaaaaggaattatcttcccgtaagaactagatagatgcattctcagaaactactttgtgacgattgcattcaagtcacagaggtgaacatttcctttcagagagcactttggaaaccctcgttgtgtagaatctgcaagtggagatatggaccgctttgaggcctatggtagtaaaggaaacagcttcatataaaaactagacagcagcattctcagaaaactctttgtgacgactgagtttaactcacagggctgaacattcctttggatggagcagtttggaaacacactatctgtaggatctgcaagcggatacttgggcctccctgaggatttcgttggaaacgggatacactgcacagaactaaacagaagcattctcagaaccttcttcgtgatgtttgcattcaacccacagtgttgaacctttctttgatagttcaggtttgaaacactctttttgtagaaactgcaggtggataactgcacttctttgaggcctatcgtagtaaaggaaataacttcctataaaaacaagacagaagctttctcagaaaattctctgggatgattgagttgaactcacagagcagtactttccttgggatggagtagtttcgaaacacactttctgtagaatctgcaagtggatatttggacctgtctgaggaattcgttgcaaacgggataatttcagctaagtaaacagaagcagtctcagaatcttcttgtgatgtttgcattcaaatcccagaatggaaccttcctttgaaagttcaggttggaaacactctttttgcaggatctacaagtggatattcggaccactctgtggacttcgttcgaaacgggtatatcttcacataacatctagacagaagcattctcagaaacttttctgtgatgactgcattcaactcacagagttgaacactccttttgagagcgcagttttgcaactctccttctctggaatctgcaaggggacatgcagacctctttgaaggtttcgttggaaacggaatcatcttcacataaaaattacacggaagcatcctcaggaactccttggtgatgtttgtattcaacttccagagttgaactttccttcggaaagagcagctatgaaacactctttttctagaatctgcaagtggacattgggagggctgtgaggtttgtggtggaaaaggaaatatctccacataaatactagatagaagccttctcagaaactactttgtgatgactgcattcacctcacggagtggagcattcctattgacagagcagtttggaaacactcttcttgtagaatcggctagtggagagttggagcgctttgaggcctatggtagtaaagggaagagcttcacataaaatctagacagacgcattctcagaaaatactttgtgatgattgagtttaacacacagagctgaacattcctttggatggagaaggtttgaaacacactttctgtagaatctgcgagtggatatttggacctctctgaggatttcgttggaaacgggataactgcacctaactaaacggaagcattctcacaaaattctttgtgatgtttgcattcaaatcccagagttgaaccttcctttgatagttcagctttgaaacattctttttgtaggttctgcaagtggatatttggacgactctttggccttcgttcgaaacgggtacatcttcaaatgaaaactagacagaagccttctcagaaacttctctgtgacgattgcattcaactcaaagcgttgaaccctcctatggatagagcagttttgaatctctctttttgtggaatctgcaagtggatatgtggtcctctttgaagatgtctttggaaacgggaatatcttcacataaaaactaaacagaagcattctcagaaacttctctgtgatgtttgtgtccaactcacagagtttcacgttgcttttcatagagcagatgagaaacatgcttttcgtagggtctgcaagtggacatttggagagatttcaggcctgtggtggaaaacgaattatcgtcacgtaaaaactagagagaagcattgtcagaaacttgtttgtgatgactgcattcaactcacagagttggaggttccttttcaaacagcagtttccaaacactctttctgtggcatctgcaagtggatgtttgggcctctttgaagatttcgttggaaacgggataatcttcacagaaaagctaaacagaagcattctcagaaacttctttgtgatgtttgctttcaactcacagagttgaactttccttttgagagagaagctttgaaacactctttttctagaatctgcaagtggatatttggagggctttgaggcctgtggtggaaaaggaattatcttcccgtaagaactagatagatgcattctcagaaactactttgtgacgattgcattcaagtcacagaggtgaacattccctttcagagagcactttggaaactctcgttgtgtagaatctgcaagtggagatatggaccgctttgaggcctatggtagtaaaggaaacagcttcatataaaaactagacagcagcattctcagaaaactctttgtgacgactgagttaaactcacagggctgaacattcctttggatggagcagtttggaaacacactatctgtaggatctgcaagcggatactttggcctccctgaggatttcgtgggaaacgggataaaccgcacagaactaaacagaagcattctcagaaccttcttcgtgatgtttgcattcaacccacagtgttgaacctttctttgatagttcaggtttgaaacactctttttgtagaaactgcaagtggataactgcacttctttgaggcctatcgtagtaaaggaaataacttcctataaaaacaagacagaagctttctcagaaaattctctgggatgattgagttgaactcacagagcagtactttccttgggatggagtagtttcgaaacacactttctgtagaatctgcaagtggatatttggacctgtctgaggaattcgttgcaaacgggataatttcagctaagtaaacagaagcagtctcagaatcttcttgtgatgtttgcattcaaatcccagaatggaaccttcctttgaaagttcaggttggaaacactctttttgcaggatctacaagtggatattcggaccactctgtggacttcgttcgaaacgggtatatcttcacataacatctagacagaagcattctcagaaacttttctgtgatgactgcattcaactcacagagttgaacactccttttgagagcgcagttttgaaactctctttctctggaatctgcaaggggacatgcagacctctttaaaggtttcgttggaaacggaatcatcttcacataaaaattacacagaagcatcctcaggaactccttggtgatgtttgtattcaacttccagagttgaactttccttcggaaagagcagctatgaaacactctttttctagaatctgcaagtggacattgggagggctgtgaggtttgtggtggaaaaggaaatatctccacataaatactagatagaagccttctcagaaactactttgtgatgattggattcacctcacggagtggagcattcctattgacagagcagtttggaaacactcttgttgtagaatctgctagtggagatttggagcgctttgaggcctatggtagtaaagggaagagcttcacataaaatcaagacagaagcattctcagaaaatactttgtgatgattgagtttagcacacagagctgaacattcctttggatggagaaggtttgaaacacactttctgtagaatctgcgagtggatatttggacctctctgaggatttcgttggaaacgggataactgcacctaactaaacggaagcattctcacaaaattcttcgtgatgtttgcattcaaatcccagagttgaaccttcctttgatagttcagctttgaaacactctttttgtaggatctgcaagtggatatttggaccactctttggccttccttcgaaacggctgcatcttcatataaaatctagacagaagccttctcagaaacttctctgtgacgattgcattcaactcaaagcgttgaaccctcctatcgatagagcagttttgaatctctctttttgtggaatctgcaagtggatatgtggtcctctttgaagatgtctttggaaacgggaatatcttcacataaaaactaaacagaagcattctcagaaacttctctgtgatgtttgtgttcaactcacagagtttcacgttgcttttcatagagcagatgagaaacatgcttttcgtagggtctgcaagtggacatttggagagatttcaggcctgtggtggaaagcgaattatcgtcacgtaaaaactagagagaagcattgtcagaaacttgtttgtgatgactgcattcaactcacagagttgaaggttccttttcaaacagcagtttccaaacactctttctgtggcatctgcaagtggatgtttgggcctctttgaagatttcgttggaaacgggataatcttcacagaaaagctaaacagaagcattctcagaaacttctttgtgatgtttgctttcaactcacagagttgaactttccttttgagagagaagctttgaaacactctttttctagaatctgcaagtggatatttggagggctttgaggcctgaggtggaaaaggaattatcttcccgtaagaactagatagatgcattctcagaaactactttgtgacgattgcattcaagtcacagaggtgaacattccctttcagagagcactttggaaactctcgttgtgtagaatctgcaagtggagatatggaccgctttgaggcctatggtagtaaaggaaacagcttcatataaaaactagacagcagcattctcagaaaactctttgtgtcgactgagtttaactcacagggctgaacattcctttggatggagcagtttggaaacacactatctgtaggatctgcaagcggatacttgggcctctctgaggattgcgttggaaacgggataaaccgcacagaacgaaacagaagcattctcagaaccttcttcgtgatgtttgcattcaacccacagtgttgaacatttctttgatagttcaggtttgaaacactctttctgtagaaactgcaagtggataactgcacttctttgaggcctatcgtagtaaaggaaataacttcctataaaaacaagacagaagctttctcagaaaattctctgcgatgattgagttgaactcacagagcagtactttccttgggatggagtagtttcgaaacacactttctgtagaatctgcaagtggatatttggacctgtctgaggaattcgttgcaaacgggataatttcagctaagtaaacagaagcagtctcagaatcttcttgtgatgtttgcattcaaatcccagaatggaaccttcctttgaaagttcaggttggaaacactctttttgcaggatctacaagtggatattcggaccactctgtggacttcgtttgaaacgggtatatcttcacataacatctagacagaagcattctcagaaacttttctgtgatgactgcattcaactcacagagttgaacactccttttgagagcgcagttttgaaactctctttctctggaatctgcaaggggacatgcagacctctttgaaggtttcgttggaaacggaatcatcttcacataaaaattacacggaagcatcctcaggaactccttggtgatgtttgtattcaacttccagagttgaactttccttcggaaagagcagctatgaaacactctttttctagaatctgcaagtggacattgggagggctgtgaggtttgtggtggaaaaggaaatatctccacataaatactagatagaagccttctcagaaactcctttgtgatgattgcattcacctcacggagtggagcattcctattgacagagcagtttggaaacactcttgttgtagaatctcctagtggagatttggagcgctttgaggcctatggtagtaaagggaagagcttcacataaaatctagacagaagcattctcagaaaatactttgtgatgattgagtttaacacacagagctgaacattcctttggatggagaaggtttgaaacacactttctgtagaatctgcgagtggatatttggacctctctgaggatttcgttggaaacgggataactgcacctaactaaacggaagcattctcacaaaattctttgtgatgtttgcattcaaatcccagagttgaaccttcctttgatagttcagctttgaaacactctttttgtaggatctgcaggtggatatttggaccactctttggccttcgttcgaaaagggtacatcttcaaataaaatctagacagaagccttctcagaaacttctctgtgacgattgcattcaactcaaagcgttgaaccctcctatggatagagcagttttgaatctctctttttgtggaatctgcaagtggatatgtggtcctctttgaagatgtctttggaaacgggaatatcttcacataaaaactaaacagaagcattctcagaaacttctctgtgatgtttgtgtccaaatcacagagtttcacgttgcttttcatagagcagatgagaaacatgcttttcgtagggtctgcaagtggacatttggagagatttcccgcctgcggtggaaaacgaattatcgtcacgtaaaaactagagagaagcattgtcagaaacttgtttgtgatgactgcattcaactcacagagttgaaggttccttttcaaacagcagtttccaaacactctttctgtggcatctgcaagtggatgtttgggcctctttgaagatttcgttggaaacgggataatcttcacagaaaagctaaacagaagcattctcagaaacttctttgtgacgtttgctttcaactcacagagttgaactttccttttgagagagaagctttgaaacactctttttctagaatctgcaagtggatatttggagggctttgaatcctgtggtggaaaaggaattatcttcccgtaagaactagatagatgcattctcagaaactactttgtgacgattgcattcaagtcacagaggtgaacattccctttcagagagcactttggaaactctcgttgtgtagaatctgcaagtggagatatggaccgctttgaggcctatggtagtaaaggaaacagcttcatataaaaactagacagcagcattctcagaaaacactttgtgacgactgagtttaactcacagggctgaacattcctttggatggagcagtttggaaacacactatctgtaggatctgcaagcggatacttgggcctccctgaggatttcgtgggaaacgggataaaccgcacagaactaaacagaagcattctcagaaccttcttcgcgatgtttgcattcaacccacagtgttgaacctttctttgatagttcacgtttgaaacactctttttgtagaaactgcaagtggataactgcacttctttgaggcctatcgtagtaaaggaaataacttcctataaaaacaagacagaagctttctcagaaaattctctgggatgattgagttgaactcacagagcagtactttctttgggatggagtagtttcgaaacacactttctgtacaatctgcaagtggatatttggacctgtctgaggaattcgttgcaaacgggataatttcagctaattaacagaagcagtctcagaatcttcttgtgatgtttgcattcaaataccagaattgaaccttcctttgaaagttcaggttggaaacactctttttgcaggatctacaagtggatattcggaccactctgtggacttcgttcgaaacggctatatcttcacataacatctagacagaagcattctcagaaacttttctgtgatgactgcattcaacacacagagttgaacactccttttgagagcgcagttttgaaactctctttctctggaatctgcaaggggacatgcagacctctttgaaggtttcgttggaaacggaatcatcttcacataaaaattacacagaagcattcttaggaactccttggtgatgtttgtattcaacttccagagttgaactttccttcggaaagagcagctatgaaacaccctttttctagaatctgcaagtggacattgggagggctgtgaggtttgtggtggaaaaggaaatatctccacataaatactagatagaagccttctcagaaactactttgtgatgattgcattcacctcacggagtggagcattcctattgacagagcagtttggaaacactcttgttgtagaatctgctagtggagatttggagcgctttgaggcctatggtagtaaagggaagagcttcacataaaatctagacagaagcattctcagaaaatactttgtgatgattgagtttaacacacagagctgaacattcctttggatggagaaggtttgaaacacactttctatagaatctgcgagtggatatttggacctctctgaggatttcgttggaaacgggataactgcacctaactaaacggaagcattctcacaaaattctttgtgatgtttgcattcaaatcccagagttgaaccttcctttgatagttcagctttgaaacactctttttgtaggatctgcaggtggatatttggaccactctttggccttcgttcaaaacgagtacatcttcaaataaaatctagacagaagccttctcagaaacttctctgtgatgattgcattcaactcaatgcgttgaaccctcctatggatagggcagttttgaatctctctttttgtggaatctgcaagtggatatgtggtcctctttggagatgactttggaaacgggaatatcttcacataaaaactaaacagaagcattctcagaaacttctctgtgatgtttgtgtccaaatcacagagtttcacgttgcttttcatagagcagatgagaaacattcttttcgtagggtctgcaagtggacatttggagagatttcaggcctgtggtggaaaacgaattatcgtcaagtaaaaactagagggaagcattgtcagaaacttgtttgtgatgactgcattcaactcacagagttgaaggttccttttcaaacagcagtttccaaacactctttctgtggcatctgcaagtggatgtttgggcctctttgaagatttcgttggaaacgggataatcttcacagaaaagctaaacagaagcattctcagaaacttctttgtgatgtttgctttcaactcacagagttgaactttccttttgagagagaagctttgaaacactctttttctagaatctgcaagtggatatttggagggctttgaggcctgtggtggaaaaggaattatcttcccgtaagaactagatagatgcattctcagaaactactttgtgacgattgcattcaagtcacagaggtgaacattccctttcacagagcactttggaaactctcgttgtgtagaatctgcaagtggagatatggaccgctttgaggcctatggtagtaaaggaaacagcttcatataaaaactagacagcagcattctcagaaaactctttgtgacgactgagtttaactcaaagggctgaacattcctttcgatggagcagtttggaaacacactatctctaggatctgcaagcggatacttgggcctctctgaggatttcgttggaaacgggataaaccgcacagaactaaacagaagcattctcagaaccttcttcgtgacgtttgcattcaacccacagtgttgaacctttctttgatagttcaggtttgaaacactctttttgtagaaactgcaagtggataactgcacttctttgaggcctatcgtagtaaaggaaataacttcccataaaaacaagacagaagctttctcagaaaattctctgggatgattgagttgaactcacagagcagtactttccttgggatggagtagtttcgaaacacactttctgtagaatctgcaagtggatatttggacctgtctgaggaattcgttgcaaacgggataatttcagctaagtaaacagaagcagtctcagaatcttcttgtgatgtttgcattcaaatcccagaattgaaccttcctttgaaagttcaggtttgaaacactctttttgcaggatctacaagtggatattcggaccactctgtggacttcgttcgaaacgggtataccttcacataacatctagacagaagcattctcagaaacttttctgtgatgactgcattcaactcacagagttgaacactccttttgagagcgcagttttgaaactctctttctctggaatctgcaaggggacatgcagacccctttgaaggtttcgttggaaacggaatcatcttcacataaaaattacacagaagcattctcaggaactccttggtgatgtttgtattcaacttccagagttgaactttccttcggaaagagcagctatgaaacactctttttctagaatctgcaagtggacattgggagggctgtgaggtttgtggtggaaaaggaaatatctccacataaatactacatagaagccttctcacaaactactttgtgatgattgcattcacctcacggagtggagcattcctattgacagagcagtttggaaacactcttgttgtagaatcggcgagtggagatttggagcgctttgaggcctatggtagtaaagggaagagcttcacataaaatctagacagaagcattctcagaaaatactttgtgatgattgagtttaacacacagagctgcacattcctttggatggagaaggtttgaaacacactttctgtagaatctgcgagtggatatttggacctctctgaggatttcgttggaaacgggataactgcacctaactaaacggaagcattctcacaaaattctttgtgatgtttgcattcaaatcccagagttgaaccttcctttgatagttcagctttgaaacactctttttgtaggatctgctggtggatatttggaccactctttggccttcgttcgaaacggttacatcttcaaagaaaatctagacagaagccttctcagaaacttctctgtgatgattgcattcaactcaaagcgttgaaccctcctatggatagagcagttttgaatctctctttttgtggaatctgcaagtggatatgtggtcctctttgaagatgtctttggaaacgggaatatgttcacataaaaactaaacagaagcattctcagaaacttctctgtgatgtttgtgttcaactcacagagtttcacgttgcttttcatagagcagatgagaaacatgcttttcgtagggtctgcaagtggacatttggagagatttcaggcctgtggtggaaaacgaattatcgtcacgtaaaaactagagagaagcattgtcagaaacttgtttgtgatgactgcattcaactcacagagttgaaggttccttttcaaacagcagtttccaaacactctttctgtggcatctgcaagtggatgtttgggcctctttgaagatttcgttggaaacgggataatcttcacagaaaagctaaacagaagcattctcagaaacttctttgtgatgtttgctttcaactcacagagttgaactttccttttgagagagaagctttgaaccactctttttctagaatctgcaagtggatatttggagggctttgaggcctgaggtggaaaaggaattatcttcccgtaagaactagatagatgcattctcagaaactactttgtgacgattgcattcaagtcacagaggtgaacattccctttcagagagcactttggaaactctcgttgtgtagaatctgcaagtggagatatggaccgctttgaggcctatggtagtaaaggaaacagcttcatataaaaactagacagcagcattctcagaaaactctttgtgacgactgagtttaactcacagggctgaacattcctttggatggagcagtatggaaacacactatctgtaggatctgcaagcggatacttgggcctccctgaggatttcgttggaaacgggataaaccgcacagaactaaacagaagcattctcagaaccttcttcgtgatgtttgcattcaacccacagtgttgaacctttctttgatagttcaggtttgaaacactgtttttatagaaactgcaagtggataactgcacttctttgaggcctatcgtagtaaaggaaataacttcctataaaaacaagacagaagctttctcagaaaattctctgggatgattgagttgaactcacagagcagtactttctttgggatggagtagtttcgaaacacactttctgtacaatctgcaagtggatatttggacctgtctgaggaattcgttgcaaacgggataatttcagctaattaacagaagcagtctcagaatcttcttgtgatgtttgcattcaaatcccagaattgaaccttcctttgaaagttcaggttggaaacactctttttgcaggatctacaagtggatattcggaccactctgtggacttcgttcgaaacggctatatcttcacataacatctagacagaagcattctcagaaacttttctgtgatgactgcattcaactcacagagttgaacactccttttgagagcgcagttttgaaactctctttctctggaatctgcaaggggacatgcagacctctttgaaggtttcgttggaaacggaatcatcttcacataaaaattacacagaagcattctcaggaactccttggtgatgtttgtattcaacttccagagttgaactttccttcggaaagagcagctatgaaacactctttttctagaatctgcaagtggacattgggagggctgtgaggtttgtggtggaaaaggaaatatctccacataaatactagatagaagccttctcagaaactactttgtgatgattgcattcacctcacggagtggagcattcctattgacagagcagtttggaaacactcttctcgtagaatcggctagtggagatttggagcgctttgaggcctatggtagtaaagggaagagcttcacataaaatctagacagacgcattctcagaaaatactttgtgatgattgagtttaacacacagagctgaacattcctttggatggagaaggtttgaaacacactttctgtagaatctgcgagtggatatttggacctctctgaggatttcgttggaaatgggataactgcacctaactaaacggaagcattctcacaaaattctttgtgatgtttgcattcaaatcccagagttgaaccttcctttgatagttcagctttgaaacattctttttgtaggttctgcaagtggatatttggacgactctttggccttcgttcgaaacgggtacatcttcaaatgaaatctagacagaagccttctcagaaacttctctgtgacgattgcattcaactcaaagagttgaaccctcctatggatagagcagttttgaatctctctttttgtggaatctgcaagtggatatgtgttcctctttgaagatgtctttggaaacgggaatatcttcacattaaaactaaacagaagcattctcagaaacttctctgtgatgtttgtgttcaactcacagagtttcacgttgcttttcatacagcagatgagaaacatgcttttcgtagggtctgcaagtggacatttggagagatttcaggcctgtggtggaaaacgaattatcgtcacgtaaaaactagagagaagcattgtcagaaacttgtttgtgatgactgcattcaactcacagagttgaaggttccttttcaaacagcagtttccaaacactctttctgtggcatctgcaagtggatgtttgggcctctttgaagatttcgttggaaacgggatactcttcacagaaaagctaaacagaagcattctcagaaacttctttgtgatgtttgctttcaactcacagagttgaactttccttttgagagagaagctttgaaacactctttttctagaatctgcaagtggatatttggagggctttgaggcctgaggtggaaaaggaattatcttcccgtaagaactagatagatgcattctcagaaactactttgtgacgattgcattcaagtcacagaggtgaacattccctttcagagagcactttggaaactctcgttgtgtagaatctgcaagtggagatatggaccgctttgaggcctatggtagtaaaggaaacggcttcatataaaaactagacagcagcattctcagaaaaccctttgtgacgactgagtttaactcacagggctgaacattcctttggatggagcagtttggaaacacactatctgtaggatctgcaagcggatacttgggcctccctgaggatttcgttggaaacgggatacaccgcacagaactaaacagaagcattctcagaaccttcttcgtgatgtttgcattcaacccacagtgttgaacctttctttgatagttcaggtttgaaacactctttttgtagaaactgcaggtggataactgcacttctttgaggcctatcgtagtaaaggaaataacttcctataaaaacaagacagaagctttctcagaaaattctctgggatgattgagttgaactcacagagcagtactttccttgggatggagtagtttcgaaacacactttctgtagaatctgcaagtggatatttggacctgtctgaggaattcgttgcaaacgggataatttcagctaagtaaacagaagcagtctcagaatcttcttgtgatgtttgcattcaaatcccagaatggaaccttcctttgaaagttcaggttggaaacactctttttgcaggatctacaagtggatattcggaccactctgtggacttcgttcgaaacgggtatatcttcacataacatctagacagaagcattctcagaaacttttctgtgatgactgcattcaactcacagagttgaacactccttttgagagcgcagttttgaaactctctttctctggaatctgcaaggggacatgcagacctctttgaagatttcgttggaaacggaatcatcttcacataaaaattacacagaagcatcctcaggaactccttggtgatgtttgtattcaacatccagagttgaactttccttcggaaggagcagctgtgaaacaccctttttctagaatctgcaagtggacattgggagggctgtgaggtttgtggtggaaaaggaaatatctccacgtaaatactagatagaagccttctcagaaactactttgtgatgattgcattcacctcacggagtggagcattcctattgacagagcagtttggaaacactcttcttgtagaatcggctactggagatttggagcgctttgaggcctatggtagtaaagggaagagcttcacataaaatctagacggaagcattctcagaaaatactttgtgatgattcagtttaacacacagagctgaacattcctttggatggagaaggtttgaaacacactttctgtagaatctgcgagtggatatttggacctctctgaggatttcgttggaaacgggataactgcacctaactaaacggaagcattctcacaaaattctttgtgatgtttgcattcaaatctcagagttgaaccttcctttgatagttcaggtttgaaacactctttttgtaggatctgcaggtggatatttggacaactctttggccttcgttcgaaacgggtacatcttcaaataaaatctagacagaagccttctcagaaacttctctgtgacgattgaattcaactcacagcgttgaaccctcctatggatagagcagttttgaatctctctttttgtggaatctgcaagtggatgtgtggtcctctttgaagatgtctttggaaacgggaatatcttcacataaaaactaaacagaagcattctcagaaacttctctgtgatgtttgtgttcaactcacagagtttcacgttgcttttcatagagcagatgagaaacatgcttttcgtagggtctgcaagtggacatttggagagctttcaggcctgtggtggaaaacgaattattgtcacgtaaaaactagagagaagcattgtcagaaacttgtttgtgatgactgcattcaactcacagagttgaaggttccttttcaaacagcagtttccaaacactctttctgtggcatctgcaagtggatgtttgggcctctttgaagatttcgttggaaacgggataatcttcacagaaaagctaaacagaagcatgctcagaaacttctttgtgatgtttgctttcaactcacagagttgaactttccttttgagagagaagctttgaaacactctttttctagaatctgcaagtggatatttgtagggctttgaggcctgaggtggaacaggaattatcttcccgtaagaactagatagatgcattctcagaaactactttgtgacgattgcattcaagtcacagaggtgaacattccctttcacagagcactttggaaactctcgttgtgtagaatctgcaagtggagatatggaccgctttgaggcctatggtagtaaaggaaaaagcttcatataaaaactagacagcagcattctcagaaaactctttgtgacgactgagtttaactcacagggctgaacattcctttggatggagcagtttggaaacacactatctgtaggatctgcaagcggatacttgggcctaccctgaggatttcgttggaaacgggataaaccgcacagaactaaacagaagcattctcagaaccttcttcgtgacgtttgcattcaacccacagtgttgaacctttctttgatagttcaggtttgaaacactctttttgtagaaactgcaagtggataactgcacttctttgaggcctatcgtagtaaaggaaataacttcctataaaaacaagacagaagctttctcagaaaattctctgggatgattgagttgaactcacagagcagtactttccttgggatggagtagtttcgaaacacactttctgtagaatctgcaagtggatatttggacctgtctgaggaattcgttgcaaacgggataatttcagctaagtaaacagaagcagtctcagaatcttcttgtgatggttgcattcaaatcccagaattgaaccttcctttgaaagttcaggttggaaacactctttttgcaggatctacaagtggatattcggaccactctgtggacttcgttcgaaacgggtatatcttcacataacatctagacagaagcattctcagaaacttttctgtgatgactgcattcaactcagagagttgaacactcctttagagagcgcagttttgaaactctctttctctggaatctgcaaggggacatgcagacctctttgaaggtttcgttggaaacggaatcatcttcacataaaaattacacagaagcatcctcaggaactccttggtgatgtttgtattcaacttccagagttgaactttccttcggaaagagcagctatgaaacactctttttctagaatctgcaagtggacattgggagggctgtgaggtttgtggtggaaaaggaaatatctccacataaatactagatagaagccttctcagaaactactttgtgatgatttcattcacctcacggagtggagcattcgtattgacagagcagtttggaaacactcttgttgtagaatctcctagtggagatttggagcgctttgaggcctatggtagtaaagggaagagcttcacataaaatctagacagaagcattctcagaaaatactttgtgatgattgagtttaacacacagagctgaacattcctttggatggagaaggtttgaaacacactttctgtagaatctgcgagtggatattgggacctctctgaggatttctttggaaaccggataactgcacctaactaaacggaagcattctcacaaaattctttgtgatgtttgcattcaaatcccagagttgaaccttcctttgatagttcagctttggaacactctttttgtaggatctgcaggtggatatttggaccactctttggccttcgttcaaaacgggtacatcttcaaataaaatctagacagaagccttctcagaaacttctctgggatgcttgcattcaactcaaagcgttgaaccctcctatggatagagcagttttgaatctctctttttgtggaatctgcaagtggatatgtggtcctcttagaagttgtctttggaaacgggaatatcttcacataaaaactaaacagaagcattctcagaaacttctctgtgatgtttgtgttcaactcacagagtttcacgttgcttttcatagagcagatgagaaacatgcttttcgtagggtctgcaagtggacatttggagagatttcaggcctgtggtggaaaacgaattatcgtcacgtaaaaactagagagaagcattgtcagaaacttgtttgtgatgactgcattcaactcacagagttgaaggttccttttcaaacagcagtttccaaacactctttctgtggcatctgcaagtggatgtttgggcctctttgaagatttcgttggaaacgggataatcttcacagaaaagctaaacagaagcattctcagaaacttccttgtgatgtttgctttcaactcacagagttgaactttccttttgagagagaagctttgaaacactctttttctagaacctgcaagtggatatttggagggctttgaggcctgaggtggaaaaggaattatattcccgtaagaactagatagatgcattctcagaaactactttgtgacgattgcattcaagtcacagaggtgaacattccctttcacagagcactttggaaactctcgttgtgtagaatctgcaagtggagatatggaccgctttgaggcctatggtagtaaaggaaacagcttcatataaaaactagacagcagcattctcagaaaactctttgtgacgactgagtttaactcacagggctgaacattcctttggatggagcagtttggaaacacactatctgtaggatctgcaagcggatacttgggcctccctgaggatttcgttggaaacgggataaaccgcacagaactaaacagaagcattctcagaaccttcttcgtgatgtttgcattcaacccacagtgttgaacctttctttgatagttcaggtttgaaacactctttttgtagaaactgcaagtggataactgcacttctttgaggcctgtcgtagtaaaggaaataacttcctataaaaacaagacagaagctttctcagaaaattctctgggatgattgagttgaactcacagagcagtactttctttgggatggagtagtttcgaaacacactttctgtacaatctgcaagtggatatttggacctgtctgaggaattcgttgcaaacgggataatttcagctaagtaaagagaagcagtctcagaaacttcttgtgatgtttgcattcaaatcccagaattgaaccttcctttgaaagttcaggttggaaacactctttatgcaggatctacaagtggatattcggaccactctgtggacttcgttcgaaacgggtatatcttcacataacatctagacaggaagcattctcagaaacttttctgtgatgactgcattcaactcacagagttgaacactccttttgagagcgcagttttgaaactctctttctctggaatctgcaaggggacatgcagacctctttgaaggtttcgttggaaacggaatcatcttcacataaaaattacacagaggcatcctcaggaactccttggtgatgtttgtattcaacttccagagttgaactttccttcggaaagagcagctatgaaacactctctttctagaatctgcaagtggacattgggagggctgtgaggtttgtggtggaaaaggaaatatctccacataaatactagatagaagccttctcagaaactactttgtgatgattgcattcacctcacggagtggagcattcctattgacagagcagtttggaaacactcttgttgtagaatctgctagtggagatttggagcgctttgaggcctatggtagtaaagggaagagcttcacataaaatctagacagaagcattctcagaaaatactttgtgatgattgagtttaacacacagagctgaacattcctttggatggagaaggtttgaaacacactttctgtagaatctgcgagtggatatttggacctctctgaggatttcgttggaaacgggataactgcacctaactaaacggaagcattctcacaaaattcttcgtgatgtttgctttcaaatcccagagttgaaccttcctttgatagttcaggtttgaaacactctttttgtaggatctgcaagtggatatttggaccactctttggccttccttcgaaacgggtacatcttcaaataaaatctagacagaagccttctcagaaacttctccgtgatgattgcattcaactcaaagcgttgaaccctcctatggatagagcagttttgaatctctctttttgtggaatctgcaagtggatatgtggtcctctttgaagatgtctttggaaacgggaatatcttcacataaaaactaaacagaagcattctcagaaacttctctgtgatgtttgtgttcaactcacagagtttcacgttgcttttcatagagcagatgagaaacatgcttttcgtagggtctgcaagtggacatttggagagatttcaggcctgtggtggaaaacgaattatcgtcacgtaaaaactagagagaagcattgtcagaaacttgtttgtgatgactgcattcaactcacagagttgaaggttccttttcaaacagcagtttccaaacactctttctgtggcatctgcaagtggatgtttgggcctctttgaagatttcgttggaaacgggataatcttcacagaaaagctaaacagaagcattctcagaaacttctttgtgatgtttgctttcaactcacagagttgaactttccttttgagagagaagctttgaaacactctttttctagaatctgcaagtggatatttggagggctttgaggcctgaggtggaaaaggaattatcttcccgtaagaactagatagatgcattctcagaaactactttgtgacgattgcattcaagtcacagaggtgaacattccctttcagagagcactttggaaactctcgttgtgtagaatctgcaagtggagatatggaccgctttgaggcctatggtagtaaaggaaacagcttcatataaaaactagacagcagaattctcagaaaactctttgtgacgactgagtttaactcacagggctgaacattcctttggatggagcagtttggaaacacactatctgtaggatctgcaagcggatacttgggcctctctgaggatttcgttggaaacgggataaaccgcacagaactaaacagaagcattctcagaaccttcttcgtgatgtttgcattcaacccacagtgttgaacctttctttgatagttcaggtttgaaacactcttttcgtagaaactgcaagtggataactgcacttctttgaggcctatcgtagtaaaggaaataacttcctataaaaacaagacagaagctttctcagaaaattctctgggatgattgagttgaactcacagagcagtactttccttgggatggagtagtttcgaaacacactttctgtagaatctgcaagtggatatttggacctgtctgaggaattcgttgcaaacgggataatttcagctaagtaaacagaagcagtctcagaatcttcctgtgatgtttgcattcaaatcccagaattgaaccttcctttgaaagttcaggttggaaacactctttttgcaggatctacaagtggatattcggaccactctgtggacttcgttcgaaacgggtatatcttcacataacatctagacagaagcattctcagaaacttttctgtgatgactgcattcaactcacagagttcaacactccttttgagagcgcagtttggaaactctctttctgtggcatctgcaaggggacatgcagacctctttgaaggtttcgttggaaacggaatcatcttcacataaaaattacacagaagcattctcaggaactccttggtgatgtttgtattcaacttccagagttgaactttccttcggaaagagcagctatgaaacactctttttctagaatctgcaagtggacattgggagggctgtgaggtttgtggtggaaaaggaaatatctccacataaatactagatagaagccttctcagaaactactttgtgatgattgcattcacctcacggagtggagcatttctattgacagagcagtttggaaacactcttgttgtagaatctgctagtggagatttggagcgctttgaggcctatggtagtaaagggaagagcttcacataaaatctagacacaagcattctcagaaaatactttgtgatgattgagtttaacacacagagctgaacattcctttggatggagaagttttgaaacacactttctgtagaatctgcgagtggatatttggacctctctgaggatttcgttggaaacgggataactgcacctaactaaacggaagcattctcacaaaattctttgtgatgtttgcattcaaatcccagagttgaaccttcctttgatagttcagctttgaaacaccctttttgtaggatctgcaagtggatatttggaccagtctttggccttcgttcgaaacgggtacatcttcaaataaaatctagacagaagccttctcagaaacttctctgtgacgattgcattcaactcaaagcgttgaaccctccctatggatagagcagttttgaatctctctttttgtggaatctgcaagtggatatgtggtcctctttgaagatgtctttggaaacgggaatatcttcacataaaaactaaacagaagcattctcagaaacttctctgtgatgtttgtgttcaactcacagagtttcacgttgcttttcatagagcagatgagaaacatgcttttcgtagggtctgcaagtggacatttggagagctttcaggcctgtggtggaaaacgaattatcgtcacgtaaaaactagagagaagcattgtcagaaacttgtttgtgatgactgcattcaactcacagagttgaaggttccttttcaaacagtcgtttccaaacactctttctgtggcatctgcaagtggatgtttgggcctctttgaagatttcattggaaacgggataatcttcacagaaaagctaaacagaagcattctcagaaacttctttgtgatgtttgctttcaactcacagcagttgaactttccttttgagagagaagctttgaaacactctttttctagaatctgcaagtggatatttggagggctttgaggcctgtggtggaaaaggaattatcttcccgtaagaactagatagatgcattctcagaaactactttgtgacgattgcattcaagtcacagaggtgaacattccctttcagagagcactttggaaactctcgttgtgtagaatctgcaagtggagatatggaccgctttgaggcctatggtagtaaaggaaacagcttcatataaaaactagacagcaagcattctcagaaaactctttgtgacgactgagtttaactcacagggctgaacattcctttggatggagcagtttggaaacacactatctgtaggatctgcaagcggatacttgggcctctctgaggatttcgttggaaacgggataaaccgcacagaactaaacagaagcattctcagaaccttcttcgtgatgtttgcattcaacccacagtgttgaacctttcttcgatagttcaggtttgaaacactctttttgtagaaactgcaagtggataactgcacttctttgaggcctatcgtagtaaaggaaataccttcctatgaaaacaagacagaagctttctcagaaaattatctgggatgattgtgttgaactcacagagcagtactttccttgggatggagtagtttcgaagcacactttctgtagaatctgcaagtggatatttggacctgtctgaggaatactttgcaaacgggataatttcagctaagtaaacagaagcagtctcagaaacttcttgtgatgtttgcattcaaatcccagaattgaaccttcctttgaaagttcaggttggaaacactctttatgcaggatctacaagtggatattcggaccactctgtggacttcgttcgaaacgggtatatcttcacataacatctagacagaagcattctcagaaacttttctgtgatgactgcattcaactcacagagttgaacactccttttgagagcgcagttttgaaactctctttctctggaatctgcaaggggacatgcagacctctttgaaggtttcgttggaaacggaatcatcttcacataaaaattacacagaggcatcctcaggaactccttggtgatgtttgtattcaacttccagagttgaactttccttcggaaagagcagctatgaaacactctctttctagaatctgcaagtggacattgggagggctgtgaggtttgtggtggaaaaggaaatatctccacataaatactagatagaagccttctcagaaactactttgtgatgattgcattcacctcacggagtggagcattcctattgacagagcagtttggaaacactcttgttgtagaatcggctagtggagatttggagcgctttgaggcctatggtagtaaagggaagagcttcacataaaatctagacagaagcattctcagaaaatactttgtgatgattgagtttaacacacagagctgaacattcctttggatggagaaggtttgaaacacactttctgtagaatctgcgagtggatatttggacctctctgaggatttcgttggaaacgggataactgcacctaactaaacggaagcattctcacaaaattctttgtgatgtttgcattcaaatcccagagttgaaccttcctttgatagttcagctttgaaacactctttttgtaggatctgcaggtggatatttggaccactctttggccttcgttcgaaacgggtacatcttcaaataaaatctagacagaagccttctcagaaacttctctgtgacaattgcattcaactcagagagttgaaccctcctatggatagagcagttttgaatctctctttttgtggaatctgcaagtggatatgtggtcctctttgaagatgtctttggaaacgggaatatcttcacataaaaactaaacagaagcattctcagaaacttctctgtgatgtttgtgttcaactcacagagtttcacgttgcttttcatagagcagatgagaaacatgcttttcgtagggtctgcaagtggacatttggagagctttcaggcctgtggtggaaaacgaattatcgtcacgtaaaaactagagagaagcattgtcagaaacttgtttgtgatgactgcattcaacccacagagttgaaggttccttttcaagcagcagtttccaaacattctttctgtggcatctgcaagtggatgtttgggcctctttgaagatttcgttggaaacgggataatcttcacagaaaagctaaacagaagcatgctcagaaacttctttgtgatgtttgctttcaactcacagagttgaactttccttttgagagagaagctttgaaacactctttttctagaatctgcaagtggatatttgtagggctttgaggcctgaggtggaacaggaattatcttcccgtaagaactagatagatgcattctcagaaactactttgtgacgattgcattcaagtcacagaggtgaacattccctttcagagagcactttggaaactctcgttgtgtagaatctgcaagtggagatatggaccgctttgaggcctatggtagtaaaggaaacagcttcatataaaaactagacagcagcattctcagaaaactctttgtgacgactgagttaaactcacagggctgaacattcctttggatggagcagtttggaaacacagtatctgtaggatctgcaagcggatacttgggcctccctgaggatttcgtgggaaacgggataaaccgcacagaactaaacagaagcattctcagaaccttcttcgtgatgtttgcattcaacccacagtgttgaacctttctttgatagttcaggtttgaaacactctttttgtagaaactgcaagtggataactgcacttctttgaggcctatcgtagtaaaggaaataacttcctataaaaacaagacagaagctttctcagaaaattctctgggatgattgagttgaactcacagagcagtactttccttgggatggagtagtttcgaaacacactttctgtagaatctgcaagtggatatttggacctgtctgaggaattcgttgcaaacgggataatttcagctaagtaaacagaagcagtctcagaatcttcttgtgatgtttgcattcaaatcccagaatggaaccttcctttgaaagttcaggttggaaacactctttttgctggatctacaagtggatattcggaccactctgtggacttcgttcgaaacgggtataccttcacataacatctagacagaagcattctcagaaacttttctgtgatgactgcattcaactcacagagttgaacactccttttgagagcgcagttttgaaactctctttctctggaatctgcaaggggacatgcagacctctttgaaggtttcgttggaaacggaatcatcttcacataaaaattacacagaagcattctcaggaactccttggtgatgtttgtattcaacttccagagttgaactttccttcggaaagagcagctatgaaacactctttttctagaatctgcaagtggacattgggagggctgtgaggtttgtggtggaaaaggaaatatctccacgtaaatactagatagaagccttctcagaaactactttgtgatgattgcattcacctcacggagtggagcattcctattgacagagcagtttggaaacactcttcttgtagaatcggctagtggagatttggagcgctttgaggcctatggtagtaaagggaagagcttcacataaaatctagacagaagcattctcagaaaatactttgtgatgattgagtttaacacacagagctgaacattcctttggatggagaaggtttgaaacacactttctgtagaatctgcgagtggatatttggacctctctgaggatttcgttggaaaccggataactgcacctaactaaacggaagcattctcacaaaattctttgtgatgtttgcattcaaatcccagagttgaaccttcctttgatagttcagctttgaaacactctttttgtagggtctgcaggtggatatttggaccactctttggccttcgttcgaaacgggtacatcttcaaataaaatctagacagaagccttctcagaaacttctctgggatgattgcattcaactcaaagcgttgaaccctcctatggatagagcagttttgaatctccctttttgtggaatctgcaagtggatatgtggtcctctttgaagatgtctttggaaacgggaatatcttcacataaaaactaaacagaagcattctcagaaacttctctgtgatgtttgtgtccaaatcacagagtttcacgatgcttttcatagagcagatgagaaacattcttttcgtagggtctgcaagtggacatttggagagatttcaggcctgtggtggaaaacgaataatcgtcaagtaaaaactagagggaagcattgtcagaaacttgtttgtgatgactgcattcaactcacagagttgaaggttccttttcaaacagcagtttccaaacactctttctgtggcatctgcaagtggatgtttgggcctctttgaagatttcgttggaaaggggataatcttcacagaaaagctaaacagaagcattctcagaaacttctttgtgatgtttgctttcaactcacagagttgaactttccttttgagagagaagctttgaaacactctttttctagaatctgcaagtggatatttggagggctttgaggcctgtggtggaaaaggaattatcttcccgtaagaactagatagatgcattctcagaaactactttgtgacgattgcattcaagtcacagaggtgaacattccctttcagagagcactttggaaactctcgttgtgtagaatctgcaagtggagatatggaccgctttgaggcctctggtagtaaaggaaacagcttcatataaaaactagacagcagcattctcagaaaactctttgtgacgactgagtttaactcaaagaggctgaacattcctttcgatggagcagtttggaaacacactatctctaggatctgcaagcggatacttgggcctctctgaggatttcgttggaaacgggataaaccgcacagaactaaacagaagcattctcagaaccttcttcgtgacgtttgcattcaacccacagtgttgaacctttctttgatagttcaggtttgaaacactctttttgtagaaactgcaagtggataactgcacttctttgaggcctatcgtagtaaaggaaataacttcctataaaaacaagacagaagctttctcagaaaattctctgggatgattgagttgaactcacagagcagtacttttccttgggatggagtagtttcgaaacacactttctgtagaatctgcaagtggatatttggacctgtctgaggaattcgttgcaaacgggataatttcagctaagtaaacagaagcagtctcagaatcttcttgtgatgtttgcattcaaatcccagaattgaacattcctttgaaagttcaggttggaaacactctttttgcaggatctacaagtggatattcggaccactctgtggacttcgttcgaaacgggtatatcttcacataacatctagacagaagcattctcagaaacttttctgtgatgactgcattcaactcacagagttgaacactccttttgagagcgcagttttgaaactctctttctctggaatctgcaaggggacatgcagacctctttgaaggtttcgttggaaacggaatcatcttcacataaaaattacacagaagcattctcaggaactccttggtgatgtttgtattcaacttccagagttgaactttccttcggaaagagcagctatgaaacactctttttctagaatctgcaagtggacattgggagggctgtgaggtttgtggtggaaaaggaaatatctccacataaatactagatagaagccttctcagaaactactttgtgatgattgcattcacctcacggagtggagcattcctattgacagagcagtttggaaacactcttcttgtagaatcggctagtggagatttggagcgctttgaggcctatggtagtaaagggaagagcttcacataaaatctagacagaagcattctcagaaaatactttgtgatgattgagtttaacacacagagctgaacattcctttggatggagaaggtttgaaacacactttctgtagaatctgcgagtggatatttggacctctctgaggatttcgttggaaacgggataacagcacctaactaaacggaagcattctcacaaaattctttgtgatgtttgcattcaaatcccagagttgaaccttcctttgatagttcagctttgaaacactctttttgtaggatctgcaagtggatatttggaccactctttggccttcgttcgaaacgggtacatcttcaaataaaatctagacagaagccttctcagaaactgctctgtgacgattgcattcaactcaaagcgttgaaccctcctatggatagagcagttttgaatctctctttttgtggaatctgcaagtggatatgtggtcctctttgaagatgtctttggaaacgggaatatcttcacataaaaactaaacagaagcattctcagaaacttctctgtgatgtttgtgttcaactcacagagtttcacgttgcttttcatagagcagatgagaaacatgcttttcgtagggtctgcaagtggacatttggagagatttcaggcctgtcgtggaaaacgaattatcgtcacgtaaaaactagagagaagcattgtcagaaacttgtttgtgatgactgcattcaactcacagagttgaaggttccttttcaaacagcagtttccaaacactctttctgtggcatctgcaagtggatgtttgggcctctttgaagatttcgttggaaacgggataatcttcacagaaaagctaaacagaagcattctcagaaacttccttgtgatgtttgctttcaactcacagagttgaactttccttttgagggagaagctttgaaacactctttttctagaacctgcaagtggatatttggagggctttgaggcctgaggtggaaaaggaattatattcccgtaagaactagatagatgcattctcagaaactactttgtgacgattgcattcaagtcacagaggtgaacattccctttcacagagcactttggaaactctcgttgtgtagaatctgcaagtggagatatggaccgctttgaggcctatggtagtaaaggaaacagcttcatataaaaactagacagcagcattctcagaaaactctttgtgacgactgagtttaactcacagggctgaacattcctttggatggagcagtttggaaacacactatctgtaggatctgcaagcggatacttgggcctccctgaggatttcgttggaaaagggataaaccgcacagaactaaacagaagcattctcagaaccttcttcgtgatgtttgcattcaacccacagtgttgaacctttctttgatagttcaggtttgaaacactctttttgtagaaactgcaagtggataactgcacttctttgaggcctatcgtagtaaaggaaataacttcctataaaaacaagacagaagctttctcagaaaattctctgggatgattgagttgaactcacagagcagtactttctttgggatggagtagtttcgaaacacacgttctgtacaatctgcaagtggatatttggacctgtctgaggaattcgttgcaaacgggataatttcagctaagtaaacagaagcagtctcagaaacttcttgtgatgtttgcattcaaatcccagaattgaaccttcctttgaaagttcaggttggaaacactctttatgcaggatctacaagtggatattcggaccactctgtggacttcgttcgaaacgggtatatcttcacataacatctagacagaagcattctcagaaacttttctgtgatgactgcattcaactcacagagttgaacactccttttgagagcgcagttttgaaactctctttctctggaatctgcaaggggacatgcagacctctttgaaggtttcgttggaaacggaatcatcttcacataaaaattacacagaggcatcctcaggaactccttggtgatgtttgtattcaacttccagagttgaactttccttcggaaagagcagctatgaaacactctctttctagaatctgcaagtggacattgggagggctgtgaggtttgtggtggaaaaggaaatatctccacataaatactagatagaagccttctcagaaactactttgtgatgattgcattcacctcacggaatggagcattcctattgacagagcagtttggaaacactcttgttgtagaatctgctagtggagatttggagcgctttgaggcctatggtagtaaagggaagagcttcacataaaatctagacagaagcattctcagaaaatactttgtgatgattgagtttaacacacagagctgaacattcctttggatggagaaggtttgaaacacactttctgtagaatctgcgagtggatatttggacctctctgaggatttcgttggaaacgggataactgcacctaactaaacggaagcattctcacaaaattcttcgtgaggtttgcattcaaatcccagagttgaaccttcctttgatagttcaggtttgaaacactctttttgtaggatctgcaagtggatatttggaccacactttggccttcgtgcgaaacgggtacatcttcaaataaaatctagacagaagccttctcagaaacttctctgtgacgattgcattcaactcacagcgttgaaccctcctatggatagagcagttttgaatctctctttttgtggaatctgcaagtggatatgtggtcctctttgaagatgtctttggaaacgggaatatcttcacataaaaactaaacagaagcattctcagaaacttctctgtgatgtttgtgttcaactcacagagtttcacgttgcttttcatagagcagatgagaaacatgcttttcgtagggtctgcaagtggacatttggagagatttcaggcctgtggtggaaaacgaattatcgtcacgtaaaaactagagagaaagcattgtcagaaacttgtttgtgatgactgcattcaactcacagagttgaaggttccttttcaaacagcagtttccaaacactctttctgtggcatctgcaagtggatgtttgggcctctttgaagatttcgttggaaacgggataatcttcacagaaaagctaaacagaagcattctcagaaacttctttgtgatgtttgctttcaactcacagagttgaactttccatttgagagagaagctttgaaacactctttttctagaatctgcaagtggatatttggagggctttgaggcctgtggtggaaaaggaattatcttcccgtaagaactagatagatgcattctcagaaacttctttgtgacgattgcattcaagtcacagaggtgaacattccctttcagagagcactttggaaactctcgttgtgtagaatctgcaagtggagatatggaccgctttgaggcctatggtagtaaaggaaacagcttcatataaaaactagacagcagcattctcagaaaactctttgtgacgactgagtttaactcacagggctgaacattcctttggatggagcagtttggaaacacactatctgtaggatctgcaagcggatacttgggcctccctgaggatttcgtgggaaacgggatgaaccgcacagaactaaacagaagcattctcagaaccttcttcgtgatgtttgcattcaacccacagtgttgaacctttctttgatagttcaggtttgaaacactcttttagtagaaactgcaagtggataactgcacttctttgaggcctatcgtagtaaaggaagtaacttcctataaaaacaagacagaagctttctcagaaaattctctgggatgattgagttgaactcacagagcagaactttccttgggatggagtagtttcgaaacacactttctgtagaatctgcaagtggatatttggacctgtctgaggaattcgttgcaaacgggataatttcagctaagtaaacagaagcagtctcagaatcttcttgtgatgtttgcattcaaatcccagaattgaaccttcctttgaaagttcaggtttgaaacactctttttgcaggatctacaagtggatattcggaccactctgtggacttcgttcgaaacgggtatatcttcacataacatctagacagaagcattctcagaaacttttctgtgatgactgcattcaactcacagagttgaacactccttttgagagtgcagttttgaaactctctttctctggaatctgcaaggggacatgcagacctctttgaaggtttcgttggaaacggaatcatcttcacataaaaattacacagaagcatcctcaggaactccttggtgatatttgtattcaacttccagatttgagctttccttcagaaagagcagctatgaaacactctttttctagaatctgcaagttgacattgggagggctgtgaggtttgtggtggaaaaggaaatatctccacataaatactagatagaagccttctcagaaactactttgtgatgactgcattcacctcacggagtggagcattcctattgacagagcagtttggaaacactcttcttgtagaatcggctagtggagagttggagcgctttgaggcctatggtagtaaagggaagagcttcacataaaatctagacagaagcattctcagaaaatactttgtgatgattgagtttaacacacagagctgaacattcctttggatggagaaggtttgaaacacactttctatagaatctgcgagtggatatttggacctctctgaggatttcgttggaaacgggataactgcacctaactaaacggaagcattctcacaaaattctttgtgatgtttgcattcaaatcccagagttgaaccttcctttgatagttcagctttgaaacactctttttgtaggatctgcaggtggatatttggacaactctttggccttcattcgaaacgggtacatcttcaaataaaatctagacagaagccttctcagaaacttctctgtgatgattgcattcaactcacagagttgaaccctcctacggatagagcagtgttgaaactctctttttgtggaatctgcaagtggatatgtggacctctccgaagatgtctttggaaacgggaatatcttcacataaaaactaaacagaagcattctcagaaacttctctgtgatgtttgtgttcaactcacagagtttcacgttgcttttcatagagcagatgagaaacatgcttttcgtagggtctgcaagtggacatttggagagatttcaggcctgtggtggaaaacgaattatcgtcacgtaaaaactagagagaagcattgtcagaaacttgtttgtgatgactgcattcaactcacagagttgaaggttccttttcaaacagcagtttccaaacactctttctgtggcatctgcaagtggatgtttgggcctctttgaagatttcgttggaaacgggatactcttcacagaaaagctaaacagaagcattctcagaaacttctttgtgatgtttgctttctactcacagagttgaactttccttttgagagagaagctttgaaacactctttttctagaatctgcaagtggatatttggagggctttgaggcctgaggtggaaaaggaattatcttcccgtaagaactagatagatgcattctcagaaactactttgtgacgattgcattcaagtcacagaggtgaacattccctttcagagagcactttggaaactctcgttgtgtagaatctgcaagtggagatatggaccgctttgaggcctatggtagtaaaggaaacagcttcatataaaaactagacagcagcattctcagaaaactctttgtgacgactgagtttaactcacagggctgaacattcctttgcatggagcagtttggaaacacactatctgtaggatctgcaagcggatacttgggcctctctgaggattgcgttggaaacgggataaaccgcacagaacgaaacagaagcattctcagaaccttcttcgtgatgtttacattcaacccacagtgttgaacctttctttgatagttcaggtttgaaacactcttttagtagaaactgcaagtggataactgcacttctttgaggcctatcgtagtaaaggaaataacttcctataaaaacaagacagaagctttctcagaaaattctctgggatgattgagttgaactcacagagcagtactttccttgggatggagtagtttcgaaacacactttctgtagaatctgcaagtggatatttggacctgtctgaggaattcgttgcaaacgggataatttcagctaagtaaacagaagcagtctcagaatcttcttgtgatgtttgcattcaaatcccagaattgaaccttcctttgaaagttcaggttggaaacactctttttgcaggatctacaagtggatattcggaccacactgtggacttcgttcgaaacgggtatatcttcacataacatctagacagaagcattctcagaaacttttctgtgatgactgcattcaactcacagagttgaacactccttttgagagcgcagttttgaaactctctttctctggaatctgcaaggggacatgcagaactctttgaaggtttcgttggaaacggaatcatcttcacataaaaattacacagaagcatcctcaggaactccttggtgatgtttgtattcaacttccagagttgaactttccttcggaaagaacagctatgaaacactctttttctagaatttgcaagtggacattgggagggctgtgaggtttgtggtggaaaaggaaatatctccacataaatactagatagaagccttctcagaaactcctttgtgatgattgcattcacctcacggagtggagcattcctattgacagagcagtttggaaacactcttgttgtagaatctgctagtggagatttggagcgctttgaggcctatggtagtaaagggaagagcttcacataaaatctagacagaagcattctcagaaaatactttgtgatgattgagtttaacacacagagctgaacattcctttggatggagaaggtttgaaacacactttctgtagaatctgcgagtggatatttggacctctctgaggatttcgttggaaacgggataactgcacctaactaaacggaagcattctcacaaaattatttgtgatgtttgcattcaaatcccagagttgaaccttcctttgatagttcagctttgaaacactctttttgtaggatctgcaagtggatatttggaccactctttggccttccttcgaaacgggtacatcttcaaataaaatctcgacagaagccttctcagaaacttctctgtgatgattgcattcaactcaatgcgttgaaccctcctatggatagggcagttttgaatctctctttttgtggaatctgcaagtggatatgtggtcctctttgaagatgtctttggaaacgggaatatcttcacataaaaactaaacagaagcattctcagaaacttctctgtgatgtttgtgttcaactcacagagtttcacgttgcttttcatagagcagatgagaaacatgtttttcgtagggtctgcaagtggacatttggagagatttcaggcctgtggtggaaaacgaattatcgtcacgtaaaaactagagagaagcattgtcagaaacttgtttgtgatgactgcattcaactcacagagttgaaggttccttttcaaacagcagtttccaaacactctttctgtgggatctgcaagtggatgtttgggcctctttgaagatttcgttggaaacgggataatcttcacagaaaagctaaacagaagcatgctcagaaacttctttgtgatgtttgctttcaactcacagagttgaactttccttttgagagagaagctttgaaacactctttttctagaatctgcaagtggatatttggagggctttgaggcctgaggtggaacaggaattatcttcccgtaagaactagatagatgcattctcagaaactactttgtgacgattgcattcaagtcacagaggtgaacattccctttcagagagcactttggaaactctcgttgtgtagaatctgcaagtggagatatggaccgctttgaggcctatggtagtaaaggaaacagcttcatataaaaactagacagcagcattctcagaaaactctttgtgacgactgagtttaactcacagggctgaacattcctttggatggagcagtttggaaacacactatctgtaggatctgcaagcggatacttgggcctccctgaggatttcgttggaaacgggataaaccgcacagaactaaacagaagcattctcagaaccttcttcgtgatgtttgcattcaacccacagtgttgaacctttctttgatagttcaggtttgaaacactctttttgtagaaactgcaagtggataactgcacttctttgaggcctatcgtagtaaaggaaataacttcctataaaaacaagacagaagctttctcagaaaattctctgggatgattgagttgaactcacagagcagtactttccttgggatggagtagtttcgaaacacactttctgtagaatctgcaagtggatatttggacctgtctgaggaattcgttgcaaacgggataatttcagctaagtaaacagaagcagtctcagaatcttcttgtgatggttgcattgaaatcccagaattgaaccttcctttgaaagttcaggttggaaacactctttttgcaggatctacaagtggatattcggaccactctgtggacttcgttcgaaacgggtatatcttcacataacatctagacagaagcattctcagaaacttttctgtgatgactgcattcaactcacagagttgaacactccttttgagagcgcagttttgaaactctctttctctggaatctgcaaggggacatgcagacctctttgaaggtttcgttggaaacggaatcatcttcacataaaaattacacagaagcatcctcaggaactccttggtgatgtttgtattcaacttccagagttgaactttccttcggaaagagcagctatgaaacactctttttctagaatctgcaagtggacattgggagggctgtgaggtttgtggtggaaaaggaaatatctccacataaatactagttagaagccttctcagaaactactttgtgatgattgcattcacctcacggagtggagcattcctattgacagagcagtttggaaacactcttgttgtagaatctgctagtggagatttggagcgctttgaggcctatggtagtaaagggaagagcttcacataaaatctagacagaagcattctcagaaaatactttgtgatgattgagtttaacacacagagctgaacattcctttggatggagaaggtttgaaacacactttctgtagaatctgcgagtggatatttggacctctctgaggatttcgttggaaacgggataactgcacctaactaaacggaagcattctcacaaaattctttgtgatgtttgcattcaaatcccagagttgaaccttcctttgatagttcagctttgaaacactctttttgtaggatctgcaggtggatatttggaccactctttggccttcgttcgaaatgggtacatcttcaaataaaatctagacagaagccttctcagaaacttctctgtgacgattgaattcaactcaaagcgttgaaccctcctatggatagagcagttttgaatctctctttttgtggaatctgcaagtggatatgtggtcctctttgaagatgtctttggaaacgggaatatcttcacattaaaactaaacagaagcattctcagaaacttctctgtgatgtttgtgttcaactcacagagtttcacgttgcttttcatagagcagatgagaaacatgcttttcgtagggtctgcaagtggacatttggagagctttcaggcctgtggtggaaaacgaattatcgtcacgtaaaaactagagagaagcattgtcagaaacttgtttgtgatgactgcattcaactcacagagttgaaggtcccttttcaaacagcagtttccaaacactctttctgtggcatctgcaagtggatgtttgggcctctttgaagatttcgttggaaacgggataatcttcacagaaaagctaaacagaagcattctcagaaacttctttgtgatgtttgctttcaactcacagagttgaactttccttttgagagagaagctttgaaacactctttttctagaatctgcaagtggatatttggagggctttgaggcctgaggtggaaaaggaattatcttcccgtaagaactagatagatgcattctcagaaactactttgtgacgattgcattcaagtcacagaggtgaacattccctttcagagagcactttggaaactctcgttgtgtagaatctgcaagtggagatatggaccgctttgaggcctatggtagtaaaggaaacagcttcatataaaaactagacagcaagcattctcagaaaactctttgtgacgactgagtttaactcacagggctgaacattcctttggatggagcagtttggaaacacactatctgtaggatctgcaagcggatacttgggcctccctgaggatttcgttggaaacgggataaaccgcacagaactaaacagaagcattctcagaaccttcttcgtgatgtttgcattcaacccacagtgttgaacctttctttgatagttcaggtttgaaacactctttttgtagaaactgcaagtggataactgcacttctttgaggcctatcgtagtaaaggaaataacttcctataaaaacaagacagaagctttctcagaaaattctctgggatgattgagttgaactcacagagcagtactttccttgggatggagtagtttcgaaacacactttctgtagaatctgcaagtggatatttggacctgtctgaggaattcgttgcaaacgggataatttcagctaagtaaacagaagcagtctcagaatcttcttgtgatggttgcattcaaatcccagaattgaaccttcctttgaaagttcaggttggaaacactctttttgcaggatctacaagtggatattcggaccactctgtggacttcgttcgaaacgggtatatcttcacataacatctagacagaagcattctcagaaacttttctgtgatgactgcattcaactcacaaagttgaacactccttttgagagcgcagttttgaaactctctttctctggaatctgcaaggggacatgcacacctctttgaaggtttcgttggaaacggaatcatcttcacataaaaattacacagaagcatcctcaggaactccttggtgatgtttgtattcaacttccagagttgaactttccttcggaaagaacagctatgaaacactctttttctagaatttgcaagtggacattgggagggctgtgaggtttgtggtggaaaaggaaatatctccacataaatactagatagaagccttctcagaaactactttgtgatgattgcattcacctcacggagtggagcatccctattgatagagcagtttggaaacactcttgttgtagaatcggctagtggagatttggagcgctttgaggcctatggtagtaaagggaagagcttcacataaaatctagacagaagcattctcagaaaatactttgtgatgattgagtttaacacacagagctgaacattcctttggatggagaaggtttgaaacacactttctgtagaatctgcgagtggatatttggacctctctgaggatttcgttggaaacgggataactgcacctaactaaacggaagcattctcacaaaattctttgtgatgtttgcattcaaatcccagagttgaaccttcctttgatagttcagctttgaaacactctttttgtaggatctgcaggtggatatttggaccactctttggccttcgttcgaaaagggtacatcttcaaataaaatctagacagaagccttctcagaaacttctctgtgacgattgcattcaactcaaagcgttgaaccctcctatggatagagcagttttgaatctctctttttgtggaatctgcaagtggatatgtggtcctctttgaagatgtctttggaaacgggaatatcttcacataaaaactaaactgaagcattctcagaaacttctctgtgatgtttgtgttcaactcacagagtttcacgttgcttttcatagagcagatgagaaacatgcttttcgtagggtctgcaagtggacatttggagagctttcaggcctgtggtggaaaacgaattatcgtcacgtaaaaactagagagaagcattgttagaaacttgtttgtgatgactgcattcaactcacagagttgaaggttccttttcaaacagcagtttccaaacactctttctgtggcatctgcaagtggatgtttgggcctctttgaagatttcgttggaaacgggataatcttctcagaaaagctaaacagaagcattctcagaaacttctttgtgatgtttgctttcaactcacagagttgaactttccttttgagagagaagctttgaaacactctttttctagaatctgcaagtggatatttggagggctttgaggcctgaggtggaaaaggaattatcttcccgtaagaactagatagatgcattctcagaaagtactttgtgacgattgcattcaagtcacagaggtgaacattccctttcagagagcactttggaaactctcgttgtgtagaatctgcaagtggagatatggaccgctttgaggcctatggtagtaaaggaaacagcttcatataaaaactagacagcagcattctcagaaaactctttgtgacgactgagtttaactcacagggctgaacattcctttggatggagcagtttggaaacacactatctgtaggatctgcaagcggatacttgggcctctgtgaggatttcgttggaaacgggataaaccgcacagaactaaacagaagcattctcagaaccttcttcgtgatatttgcattcaacccacagtgttgaacctttctttgatagttcaggtttgaaacactctttttgtagaaactgcaagtggataactgcacttctttgaggcctgtcgtagtaaaggaaataacttcctataaaaacaagacagaagctttctcagaaaattctctgggatgattgagttgaactcacagagcagtactttctttgggatggagtagtttcgaaacacactttctgtacaatctgcaagtggatatttggacctgtctgaggaattcgttgcaaacgggataatttcagctaagtaaacagaagcagtctcagaatcttcttgtgatgtttgcattcaaatcccagaattgaaccttcctttgaaagttcaggttggaaacactctttttgcaggatctacaagtggatattcggaccactctgtggacttcgttcgaaacgggtatatcttcacataacatctagacagaagcattctcagaaacttttctgtgatgactgcattcaactcacagagttgaacactccttttgagagcgcagttttgaaactctctttctctggaatctgcaaggggacatgcagacctctttgaagatttcgttggaaacggaatcatcttcacataaaaattacacagaagcatcctcaggaactccttggtgatgtttgtattcaacttccagagttgaactttccttcggaaagagcagctatgaaacactctttttctagaatctgcaagtggacattgggagggctgtgaggtttgtggtggaaaaggaaatatctccacataaatactagatagaagccttctcagaaactactttgtgatgattgcattcacctcacggtattggagcattcctattgacagagcagtttggaaacactcttctcgtagaatcggctagtggagatttggagcgctttgaggcctatggtagtaaagggaagagcttcacataaaatctagacagaagcattctcagaaaatactttgtgatgattgagtttaacacacagagctgcacattcctttggatggagaaggtttgaaacacactttctgtagaatctgcgagtggatatttggacctctctgaggatttcattggaaacgggataactgcacctaactaaacggaagcattctcacaaaattctttgtgatgtttccattcaaatcccagagttgaactttcctttgatagttcagctttgaaacattctttttgtaggttctgaaagtggatatttggaccactctttggccttcgttcgaaacgggtacatcttcaaatgaaatctagacagaagccttctcagaaacttctctgtgacgattgcattcaactcaaagcgttgaaccctcctatggatagagcagttttgaatctctctttttgtggaatctgcaagtggatatgtggtcctctttgaagatgtctttggaaacgggaatatcttcacataaaaactaaacagaagcattctcagaaacttctctgtgatgtttgtgttcaactcacagagtttcacgttgctattcatagagcagatgggaaacatgcttttcgtagggtctgcaagtggacatttggagagatttccggcctgtggtggaaaacgaattatcgtcacgtaaaaactagagagaagcattgtcagaaacttgtttgtgatgactgcattcaactcacagagttgaaggttccttttcaaacagcagtttccaaacactctttctgtggcatctgcaagtggatgtttgggcctctttgaagatttcgttggaaacgggataatcttcacagaaaagctaaacagaagcatgctcagaaacttctttgtgatgtttgctttcaactcacagagttgaactttccttttgagagagaagctttgaaacactctttttctagaatctgcaagtggatatttggagggctttgaggcctgaggtggaacaggaattatcttcccgtaagaactagatagatgcattctcagaaactactttgtgacgattgcattcaagtcacagaggtgaacattccctttcagagagcactttggaaactctcgttgtgtagaatctgcaagtggagatatggaccgctttgaggcctatggtagtaaaggaaacagcttcatataaaaactagacagcagcattctcagaaaaatctttctgacgactgagtgtaactcacagggttgaacattcctttggatggagcagtttggaaacacactatctgtaagatctgcaagcggatacttgggcctctctgaggattttgttggaaacgggataaaccgcacagaactaaacagaaagcattctcagaaaccttcttcgtgatgtttgcattcaacccacagtgttgaacctttctttgctagttcaggtttgaaacactctttttgtagaaactgcaagtggataactgcacttctttgaggcctatcgtagtaaaggaaataacttcctataaaaacaagacagaagctttctcagaaaattctctgggatgattgagttgaactcacagagcagtactttccttgggatggagtagtttcgaaacacactttctgtagaatctgcaagtggatatttggacctgtctgaggaattcgttgcaaacgggataatttcagctaagtaaacagaagcagtctcagaatcttcttgtgatgtttgcattcaaatcccagaattgaaccttcctttgaaagttcaggttggaaacactctttttgcaggatctacaagtggatattcggaccactctgtggacttcgttcgaaacgggtatatcttcacataacatctagacagaagcattctcagaaacttttctgtgatgactgcattcaactcacagagttgaacactccttttgagagcgcagttttgaaactctctttctctggaatctgcaaggggacatgcagacctctttgaaggtttcattggaaacagaatcatcttcacataaaaattacacagaagcattctcaggaactccttggtgatgtttgtattcaacttccagagttgaactttccttcggaaagagcagctatgaaacactctttttctagaatctgcaagtggacattgggagggctgtgaggtttgtggtggaaaaggaaatatctccacgtaaatactagatagaagccttctcagaaactactttgtgatgattgcattcacctcacggagtggagcattcctattgacagagcagtttggaaacactcttgttgtagaatcggctagtggagatttggagcgctttgaggcctatggtagtaaagggaagagcttcacatacaatctagacagaagcattttcagaaaatactttgtgatgattgagtttaacacacagagctgcacattcctttggatggagaaggtttgaaacacactttctgtagaatctgcgagtggatatttggacctctctgaggatttcgttggaaacgggataactgcacctaactaaacggaagcattctcacaaaattctttgtgatgtttgcattcaaatcccagtagttgaaccttcctttgatagttcagctttgaaacactctttttgtaggttctgcaggtggatatttggaccactctttggccttcgttcgaaacgggtacatcttcaaataaaatctagacagaagccttctcagaaacttctctgtgacgattgcattcaactcaaagcgttgaaccctccctatggatagagcagttttgaatctctctttttgtggaatctgcaagtggatatgtggtcctctttgaagatgtctttggaaacgggaatatcttcacataaaaactaaacagaagcattctcagaaacttctctgtgatgtttgtgttcaactcacagagtttcacgttgcttttcatagagcagatgagaaacatgcttttcgtagggtctgcaagtggacatttggagagatttcaggcctgtggtggaaaacgaattatcgtcacgtaaaaactagagggaagcattgtcagaaacttgtttgtgatgactgccttcaactcacagagttgaaggttccttttcaaacagcagtttccaaacactctttctgtggcatctgcaagtggatgtttgggcctctttgaagatttcgttggaaacgggataatcttcacagaaaagctaaacagaagcattctcagaaacttctttgtgatgtttgctttcaactcacagagttgaactttccttttgagagagaagctttgaaacactctttttctagaatctgcaagtggatatttggagggctttgaggcctgaggtggaaaaggaattatcttcccgttaaaactagatagatgcattctcagaaactactttgtgacgattgcattcaagtcacagacgtgaacattccctttcacagagcactttggaaactctcgttgtgtagaatctgcaagtggagttatggagccctttgaggcctatggtagtaaaggaaacagcttcgtataaaaactagacagcagcattctcagaaaactctttgtgacgactgagtttaactcacagggctgaacattcctttggatggagcagtttggaaacacactatctgtaggatctgcaagcggatacttgggcctctgtgaggatttcgttggaaacgggataaaccgcacagaactaaacagaagcattctcagaaccttcttcgtgatgtttgcattcaacccacagtgttgaacctttctttgatagttcaggtttgaaacactctttctgtagaaactgcaagtggataactgcacttctttgaggcctatcgtagtaaaggaaataacttcctataaaaacaaggacagaagctttctcagaaaattctctgggatgattgagttgaactcacagagcagtactttccttgggatggagtagtttcgaaacacactttctgtagaatctgcaagtggatatttggacctgtctgaggaattcgttgcaaacgggataatttcagctaagtaaacagaagcaatctcagaatcttctttgtgatgtttgcattcaaatcccagagttgaaccttcctttgaaagttcaggtttgaaaccctctttttgcaggatctacaaatttattttgggaccactctgtggtcttcgttcgaaacgggtatatcttcacataacatctagacagaagcattctcagaaacttttctgtgatgactgcattccactcacagagttgtacactccttttgagagcgcagttttgaaactctctttctgtggaatctgcaaggggacatgtagacctctttgaaggtttcgtttggaaacggaatcatcttcacataaaaattacacagaagcatcctcaggaactccttggtgatgtgtgtattcaacttccagagttgaactttccttcggaaagagcagctatgaaacactctttttctagaatctgcaagtggacattgggagggctgtgaggtttgtggtggaaaaggaaatatctccacgtaaatactagatagaaggcttctcagaaactactttgtgatgattgcattcacctcacggagtggagcattcctattgacagagcagtttggaaacactcttgttgtagaatctgctagtggagatttggagcgctttgaggcctatggtagtaaagggaagagcttcacataaaatctagacagaagcattctcagaaaatactttgtgatgattgagattaacacacagagctgaacattcctttggatggagaaggtttgaaacacactttctgtagaatctgcgagtggatatttggacctctctgaggatttcgttggaaacgggataactgcacctaactaaacggaagcattctcacaaaattctttgtgatgtttgcattcaaatcccagaagttgaaccttcctttgatagttcagctttgaaacactctttttgtaggatctgcaggtggatatttggaccactctttggccttcgttcgaaacgggtacatcttcaaataaaatctagacagaagccttctcagaaacttctctgtgacgattgcattcaactcaaagagttgaaccctcctatggatagagcagttttgaatctctctttttgtggaatctgcaagtggatatgtggtcctctttgaagatgtctttggaaacgggaatatcttcacataaaaactaaacagaagcattctcagaaacttctctgtgatgtttgtgtccaaatcacagagtttcacgatgcttttcatagagcagatgagaaacattcttttcgtagggtctgcaagtggacatttggagagatttcaggcctgtggtggaaaacgaataatcgtcaagtaaaaactagagggaagcattgtcagaaacttgtttgtgatgactgcattcaactcacagagttgaaggttccttttcaaacagcagtttccaaacactctttctgtggcatctgcaagtggatgtttgggcctctttgaagatttcgttggaaacgggataatcttcacagaaaagctaaacagaagcattctcagaaacttctttgtgatgtttgctttcaactcacagagttgaactttccttttgagagagaagctttgaaacactctttttctagaatctgcaagtggatatttggagggctttgaggcctgtggtggaaaaggaattatcttcccgtaggaactagatagatgcattctcagaaaatactttgtgacgattgcattcaagtcacagaggtgaacattccctttcacagagcactttggaaactctcgttgtgtagaatctgcaagtggagatatggaccgctttgaggcctatggtagtaaaggaaacagcttcatataaaaactagacagcagcattctcagaaaactctttgtgacgactgagtttaactcacagggctgaacattcctttggatggagcagtttggaaacacactatctgtaggatctgcaagcggatacttgggcctccctgaggatttcgttggaaacgggataaaccgcacagaactaaacagaagcattctcagagccttcttcgtgatgtttgcattcaacccacagtgttgaacctttctttgatagttcacgtttgaaacactctttttgtagaaactgcaagtggataactgcacttctttgaggcctatcgtagtaaaggaaataacttcctataaaaacaagacagaagctttctcagaaaattttctgggatgattgacttgaactcacagagcagtactttccttgggatggagtagtttcgaaacacactttctgtagaatctgcaagtggatatttggacctgtctgaggaattcgttgcaaacgggataatttcagctaagtaaacagaagcagtctcagaatcttcttgtgatgtttgcattcaaatcccagaattgaaccttcctttgaaagttcaggttggaaacactctttttgcaggatctacaagtggatattcggaccactctgtggacttcgttcgaaacgggtatatcttcacataacatctagacagaagcattctcagaaacttttctgtgatgactgcattcaacacacagagttgaacactccttttgagagcacagttttgaaaatctctttctctggaatctgcaaggggacatgcagacctctttgaaggtttcgttggaaacggaatcatcttcacataaaaattacacagaagcatcctcaggaactccttggtgatgtttgtattcaacttccagagttgaactttccttcggaaagagcagctatgaaacactctttttctagaatctgcaagtggacattgggagggctgtgaggtttgtggtggaaaaggaaatatctccacataaatactagatagaagccttctcagaaactactttgtgatgattgcattcacctcaaggagatgagcatccctattgacagagcagtttggaaacactcttcttgtagaatcggctagtggagatttggagcgctttgaggcctatggtagtaaagggaagagcttcacataaaatctagacagaagcattctcagaaaatactttgtgatgattgagtttaacacacagagctgaacattcctttggatggagaaggtttgaaacacactttctgtagaatctgcgagtggatatttggacctctctgaggatttcgttggaaacgggataactgcacctaactaaacggaagcattctcacaaaattctttgtgatgtttgcattcaaatcccagagttgaaccttcctttgatagttcagctttgaaacactctttttgtaggttctgcaggtggatatttgaaccactctttggccttcgttcgaaacgggtacatcttcaaataaaatctagacagaagccttctcagaaacttctctgtgacgattgcattcaactcacagcgttgaaccctcctatggatagagcagctttgaatctctctttttgtggaatctgcaagtggatatgtggtcctctttgaagatgtctttggaaacgggaatatcttcacataaaaactaaacagaagcattctcagaaacttctctgtgatgtttgtgttcaactcacagagtttcacgttgcttttcatagagcagatgagaaacatgcttttcgtagggtctgcaagtggacatttggagagatttcaggcctgtggtggaaaacgaattatcgtcacgtaaaaactagagagaagcattgtcagaaacttgtttgtgatgactgcattccactcacagagttgaaggttccttttcaaacagcagtttcaaaacactctttctgtggcatctgcaagtgtatgtttgggtctctttgaagatttcgttggaaacgggataatcttcacagaaaagctaaacagaagcattctcagaaacttctttgtgatgtttgctttcaactcacagagttgaactttccttttgagagagaagctttgaaacactctttttctagaatctgcaagtggatatttggagggctttgaggcctgtggtggaaaacgaattatcttcccgtaagaactagatagatgcattctcagaaactactttgtgacgattgcattcaagtcacagaggtgaacattccctttcacagagcactttggaaaccctcgttgtgtagaatctgcaagtggagatatggactgctttggggcctatggtagtaaaggaaacagcttcatataaaaactagacagcagcattctcagaaaactctttgtgacgactgagtttaactcacagggctgaacattcctttggatggagcagtttggaaacacactatctgtaggatctgcaagcggatacttgggcctccctgaggatttcgttggaaacgggataaaccgcacagaactaaacagaagcattctcagaaccttcttcgtgatgtttgcattcaacccacagtgttgaacctttctttgatagttcaggtttgaaacactctttttgtagaaactgcaagtggataactgcacttctttgaggcctatcgtagtaaaggaaataacttcctataaaaacaagacagaagctttctcagaaaattctctgagatgattgagttgaactcacagagcagtactttccttgggatggagtagtttcgaaacacactttctgtagaatctgcaagtggatatttggacctgtctgaggaattcgttgcaaacgggataatttcagctaagtaaacagaagcagtctcagaatcttcttgtgatgtttgcattcaaatcccagaattgaaccttcctttgaaagttcaggttggaaacactctttttgcaggatctacaagtggatattcggaccactctgtggacttcgttcgaaaggggtatatcttcacataacatctagacagaagcattctcagaaacttttctgtgatgactgcattcaactcacagagttgaacactccttttgagagcgcagttttgaaactctctttctctggaatctgcaaggggacatgcagacctctttgaaggtttcgttggaaacggaatcatcttcacataaaaattacacagaagcatcctcaggaactccttggtgatgtttgtattcaacttccagagttgaactttcctttggaaagagcagctatgaaacacactttttctagaatctgcaagtggacattgggagggctgtgaggtttgtggtggaaaaggaaatatctccacgtaaatactagatagaagccttctcagaaactactttgtgatgattgcattcacctcacggagttgagcatccctattgacagagcagtttggaaacactcttgttgtagaataggctagtggagatttggagcgctttgaggcctatggtagtaaagggaagagcttcacataaaatctagacagaagcattctcagaaaatactttgtgatgattgagtttaacacacagagctgaacattcctttggatggagaaggtttgaaacacactttctgtagaatctgcgagtggatatttggacctctctgaggatttcgttggaaacgggataactgcacctaactaaacggaagcattctcacaaaattctttgtgatgtttgcattcaaatcccagagttgaaccttcctttgatagttcagctttgaaacactctttttgtaggatctgcaggtggatatttggaccactctttggccttcgttcgaaaagggtacatcttcaaataaaatctagacagaagccttctcagaaacttctctgtgacgattgcattcaactcaaagcgttgaaccctcctatggatagagcagttttgaatctctctttttgtggaatctgcaagtggatatgtggtcctctttgaagatgtctttggaaacgggaatatcttcacataaaaactaaacagaagcattctcagaaacttctctgtgatgtttgtgttcaactcacagagtttcacgttgcttttcatagagcagatgagaaacatgcttttcgtagggtctgcaagtggacatttggagagctttcaggcctgtggtggaaaacgaattatcgtcacgtaaaaactagagagaagcattgtcagaaacttctttgtgatgactgcattcaactcacagagttgaaggttccttttcaaacagcagtttccaaacactctttctgtggcatctgcaattggatgtttgggcctctttgaagatttcgttggaaacgggataatcttcacagaaaagctaaacagaagcattctcagaaacttccttgtgatgtttgctttcaactcacagagttgaactttccttttgagagagaagctttgaaacactctttttctagaacctgcaagtggatatttggagggctttgaggcctgaggtggaaaaggaattatattcccgtaagaactagatagatgcattctcagaaactactttgtgacgattgcattcaagtcacagaggtgaacattccctttcacagagcactttggaaactctcgttgtgtagaatctgcaagtggagatatggaccactttgaggcctatggtagtaaaggaaacagcttcatataaaaactagacagcagcattctcagaaaactctttgtgacgactgagtttaactcaaagggctgaacattcctttcgatggagcagtttggaaacacactatctctaggatctgcaagcggatacttgggcctctctgaggatttcgttggaaacgggataaaccgcacagaactaaacagaagcattctcagaaccttcttcgtgacgtttgcattcaacccacagtgttgaacctttctttgatagttcaggtttgaaacactctttttgtagaaactgcaagtggataactgcacttctttgaggcctatcgtagtaaaggaaataacttcccataaaaacaagacagaagctttctcagaaaattctctgggatgattgacttgaactcacagagcagtactttccttgggatggagtagtttcgaaacacactttctgtagaatctgcaagtggatatttggacctgtctgaggaattcgttgcaaacgggataatttcagctaagtaaacagaagcagtctcagaatcttcttgtgatgtttgcattgaaatcccagaattgaaccttcctttgaaagttcaggttggaaacactctttttgcaggatctacaagtggatattcggaccactctgtggacttcgttcgaaacgggtatatcttcacataacatctagacagaagcattctcagaaacttttctgtgatgactgcattcaactcacagagttgaacactccttttgagagcgcagttttgaaactctctttctctggaatctgcaaggggacatgcagacctctttgaaggtttcattggaaacagaatcatcttcacataaaaattacacagaagcattctcaggaactccttggtgatgtttgtattcaacttccagagttgaactttccttcggaaagagcagctatgaaacactctttttctagaatctgcaagtggacattgggagggctgtgaggtttgtggtggaaaaggaaatatctccacataaatactagatagaagccttctcagaaactactttgtgatgattgcattcacctcacggagtggagcattcctattgacagagcagtttggaaacactcttcttgtagaatcggctagtggagatttggagcgctttgaggcctatggtagtaaagggaagagcttcccataaaatctagacagaagcattctcagaaaatactttgtgatgattgagtttaacacacagagctgaacattcctttggatggagaaggtttgaaacacactttctgtagaatctgcgagtggatattgggacctctctgaggatttcgttggaaacgggataactgcacctaactaaacggaagcattctcacaaaattctttgtgatgtttgcattcaaatcccagagttgaaccttcctttgatagttcagctttgaaacactctttttgtaggatctgcaggtggatatttggaccactctttggccttcgttcgaaacgggtacatcttcaaataaaatctagacagaagccttctcagaaacttctctgtgacgattgcattcaacccaaagagttgaaccctcctatggatagagcagttttgaatctctctttttgtggaatctgcaagtggatatgtggtcctctttgaagatgtctttggaaacgggaatatcttcacataaaaactaaacagaagcattctcagaaacttctctgtgatgtttgtgttcaactcacagagtttcacgttgcttttcatagagcaggtgagaaacatgcttttcgtagggtctgcaagtggacatttggagagctttcaggcctgtggtggaaaacgaattatcgtcacgtaaaaactagagagaagcattgtcagaaacttgtttgtgatgactgcattcaactcacagagttgaaggttccttttcaaacagcagtttccaaacactctttctgtggcatctgcaagtggatgtttgggcctctttgaagatttcgttggaaacgggataatcttcacagaaaagctaaacagaagcattctcagaaacttctttgtgatgtttgctttcaactcacagagttgaactttccttttgagagagaagctttgaaacactctttttctagaatctgcaagtggacattgggagggctgtgaggtttgtggtggaaaaggaaatatctccacataaatactagatagaagccttctcagaaactactttgtgatgattgcattcacctcacggagtggagcattcctattgacagagcagtttggaaacactcttgttgtagaatcggctagaggagatttggagcgctttgagtcctatggtagtaaagggaagagcttcacataaaatctagacagaagcattctcagaaaatactttgtgatgattgagtttaacacacagagctgaacattcctttggatggagaaggtttgaaacacactttctgtagaatctgcgagtggatatttggacctctctgaggatttcgttggaaacgggataactgcacctaactaaacggaagcattctcacaaaattctttgcgatgtttgcattcaaatcccagagttgaaccttcctttgagagttcagctttgaaacactctttttgtaggatctgcaggtggatatttggaccactctttggccttcgttcgaaacgggtacatcttcaaataaaatctagacagaagccttctcagaaacttctctgtgacgattgcattcaactcaaagcgttgaaccctcctatggatagagcagttttgaatctctctttttgtggaatctgcaagtggatatgtggtcctctttgaagatgtctttggaaacgggaatatcttcacataaaaactaaacagaagcaatctcagaaacttctctgtgatgtttgtgttcaactcacagagtttcacattgcttttcatagagcagttctgaaacatgcttttcgtagtgtctgcaagtggacatttggagagctttcaggccagtggtggaaaacgaattatcatcacataaaaactagagagaagcattgtcagaaacttgtttgtgatgactgcattcaactcacagagttgaaggttcctttccaaacactctttctgtggcatctgcaagtggatgtttgggcctctttgaagatttcgttggaaatgggataatcttcacagaaaagctaaacagaagcatgctcagaaacttctttgtgatgtttgctttcaactcacagagttgaactttccttttgagagagaagctttgaaacactctttttctagaatctgcaagtggatatttggagggctttgaggcctgaggtggaacaggaattatcttcccgtaagaactagatagatgcattctcagaaactactttgtgacgattgcattcaagtcacagaggtgaacattccctttcacagagcactttggaaactctcgttgtgtagaatctgcaagtggagatatggaccgctttgacgcctatggtagtaaaggaaacagcttcatataaaaattagacagcagcattctcagaaaactctttctgacgactgagtgtaactcacagggttgaacattcctttggatggagcagtttggaaacacactatctgtaagatctgcaagcggatacttgggcctctctgaggatttcgttggaaacgggataaaccgcacagaactaaacagaagcattctcagaaccttcttcgtgacgtttgcattcaacccacagtgttgaacctttctttgatagttcaggtttgaaacactctttttgtagaaactgcaagtggataactgcacttctttgaggcctatcgtagtaaaggaaataacttcctataaaaacaagacagaagctttctcagaaaattctctgggatgattgagttgaactcacagagcagtactttccttgggatggagtagtttcgatacacactttctgtagaatctgcaagtggatatttggacctgtctgaggaattcgttgcaaacgggataatttcagctaagaaaacagaagcagtctcagaatcttcttgtgatgtttgcattcaaatcccagaattgaaccttcctttgaaagttcaggttggaaacactctttttgcaggatctacaagtggatattcggaccactctgtggacttcgttcgaaacgggtatatcttcacataacatctagacagaagcattctcagaaacttttctgtgatgactgcattcaactcacagagttgaacactccttttgagagtgcagttttgaaactctctttctctggaatctgcaaggggacatgcagacctctttgaaggtttcgttggaaacggaatcatcttcacataaaaattacacagaggcatcctcaggaactccttggtgatgtttgtattcaacttccagagttgaactttccttcggaaagagcagctatgaaacactctttttctagaatctgcaagtggacattgggagggctgtgaggtttgtggtggaaaaggaaatatctccacataaatactagatagaagccttctcagaaactactttgtgatgattgcattcacctcacggagtggagcattcctattgacagagcagtttggaaacactcttcttgtagaatcggctagtggagatttggagcgctttgaggcctatggtagtaaagggaagagcttcacataaaatctagacagaagcattctcagaaaatactttgtgatgattgagtttaacacacagacctgaacattcctttggatggagaaggtttgaaacacactttctgtagaatctgcgagtggatatttggacctctctgaggatttcgttggaaacgggataactgcacctaactaaacggaagcattctcacaaaattctttgtgatgtttgcattcaaatcccagagttgaaccttcctttgatagttcagctttgaaacactctttttgtaggatctgcaggtggatatttggaccactctttggccttcgttcgaaacgggtacatcttcaaataaaatctagacagaagccttctcagaaacttctctgtgacgattgcattcaactcaaagcgttggaccctcctatggatagagcagttttgaatctctgtttttgtggaatctgcaagtggatgtgtggtcctctttgaagatgtctttggaaacgggaatatcttcacataaaaactaaacagaagcattctcagaaacttctctgtgatgtttgtgttcaactcacagagtttcacgttgcttttcatagagcagatgagaaacatgcttttcgtagggtctgcaagtggacatttggagagatttcaggcctgtggtggaaaacgaattatcgtcacgtaaaaacgagagagaagcattgtcagaaacttgtttgtgatgactgcattcaactcacagagttgaaggttccttttcaaacagcagtttccaaacactctttctgtggcatctgcaagtggatgtttgggcctctttgaagatttcgttggaaacgggataatcttcacagaaaagctaaacagaagcattctcagaaacttctttgtgatgtttgctttcaactcacagagttgaactttccttttgagagagaagctttgaaacactctttttctagaatctgcaagtggatatttggagggctttgaggcctgtggtggaaaaggaattatcttcccgtaagaactagatagatgcattctcagaaactactttgtgacgattgcattcaagtcacagaggtgaacattccctttcagagagcactttggaaactctcgttgtgtggaatctgcaagtggagatatggaccgctttgaggcctatggtagtaaaggaaacagcttcatataaaaactagacagcagcattctcagaaaactctttgtgacgactgagtttaactcacagggctgaacattcctttcgatggagcagtttggaaacacactatctgtaggatctgcaagcggatacttgggcctctctgaggatttcgttggaaacgggataaaccgcacagaactaaacagaagcattctcagaaccttcttcgtgatgtttgcattcaacccacagtgttgaacctttctttgatagttcacgtttgaaacactctttttgtagaaactgcaagtggataactgcacttctttgaggcctatcgtagtaaaggaaataacttcctataaaaacaagacagaagctttctcagaaaattctctgggatgattgagttgaactcacagagcagtactttccttgggatggagtagtttcgaaacactctttctgtagaatctgcaagtgggtatttggacctgtctgaggaattcgttgcaaacgggataatttcagctaagtaaacagaagcagtctcagaatcttcttgtgatgtttgcattcaaatcccagaattgaaccttcctttgaaagttcaggtttgaaacactctttttgcagaatctacaagtggatattcggaccactctgtggacttcgttcgaaacgggtatatcttcacataacatctacacagaagcattctcagaaacttttctgtgatgactgcattcaactcacacagttgaacactcccttttgagagcgcagttttgaaactctctttctctggaatctgcaaggggacatgcagacctctttgaaggtttcgttggaaacggaatcatcttcacataaaaattacacagaagcatcctcaggaactccttggtgatgtttgtattcaacttccagagttgaactttccttcggaaagagcagctatgaaacactctttttctagaatctgcaagtggacattgggagggctgtgaggtttgtggtggaaaaggaaatatctccacataaatactagatagaagccttctcagaaactactttgtgatgattgcattcacctcacggagtggagcattcctattgacagagcagtttggaaacactcttcttgtagaatcggctagtggagatttggagcgctttgaggcctatggtagtaaagggaagagcttcacataaaatctagccagaagcattctcagaaaatactttgtgatgattgagtttaacacacagagctgaacattcctttggatggagaaggtttgaaacacactttctgtagaatctgcgagtggatatttggacctctctgaggatttcgttggaaacgggataactgcacctaactaaacggaagcattctcacaaaattcttcgtgatgtttgcattcaaatcccagagttgaaccttcctttgatagttcagctttgaaacactctttttgttggatctgcaagtggatatttggaccactctttggccttccttcgaaacgggtacatcttcatataaaatctagacagaagccttctcagaaacttctctgtgacgattgcattcaactcaaagcgttgaaccctcctatggatagagcggttttgaatctctctttttgtggaatctgcaagtggatatgtggtcctctttgaagatgtctttggaaacgggaatatcttcacataaaaactaaacagaagcattctcagaaacttctctgtgatgtttgtgttcaacacacagagtttcacgttgcttttcatagagccgatgagaatcatgcttttcgtagggtctgcaagtggacatttggagagatttcaggcctgtggtggaaaacgaattatcgtcacgtaaaaactagagagaagcattgtcagaaacttgtttgtgatgactgcattcaactcacagagttgaaggttccttttcaaacagcagtttccaaacactctttctgtggcatctgcaagtggatgtttgggcctctttgaagatttcgttggaaacgggataatcttcacagaaaagctaaacagaagcattctcagaaacttctttgtgatgtttgctttcaactcacagagttgaactttccttttgagagagaagctttgaaacactctttttctagaatctgcaagtggatatttggagggctttgaggcctgtgatggaaaaggaattatcttcccgtaagaactagatagatgcattctcagaaactactttgtgacgattgcattcaagtcacagaggtgaacattccctttcagagagcactttggaaactctcgttgtgtagaatctgcaagtggagatatggaccgctttgaggcctatggtagtaaaggaaacagcttcatataaaaactagacagcagcattctcagaaaactctttgtgacgactgagtttcactcacagggctgaacattcctttggatggagcagtttggaaacacactatctgtaggatctgcaagcggatacttgggcctccctgaggatttcgtgggaaacgggataaaccgcacagaactaaacagaagcattctcagaaccttcttcgtgatgtttgcattcaacccacagtgttgaacctttctttgatagttcaggtttgaaacactctttttgtagaaactgcaagtggataactgcacttctttgaggcctatcgtagtaaaggaaataacttcctataaaaacaagacagaagctttctcagaaaattctctgggatgattgagttgaactcacagagcagtactttccttgggatggagtagtttcgaaacacactttctgtagaatctgcaagtggatatttggacctgtctgaggaattcgttgcaaacgggataatttcagctaagtaaacagaagcagtctcagaattttcttgtgatgtttgcattcaaatcccagaattgaaccttcctttgaaagttcagtttggaaacactctttttgcaggatctacaagtggatattcggacctctctgtggacttcgttcgaaacgggtatatcttcacataccatctagacagaagcattctcagaaacttttctgtgatgactgcattcaactcacagagttgaacactccttttgagagcgcagttttgaaactctctttctctggaatctgcaaggggacatgcagacctctttgaaggtttcattggaaacagaatcatcttcacataaaaattacacagaagcatcctcaggaactccttggtgatgtttgtattcaacatccagagttgaactttccttcggaaagagcagctgtgaaacaccctttttctagaatctgcaagtggacattgggagggctgtgaggtttgtggtggaaaaggaaatatctccacgtaaatactagatagaagccttctcagaaactactttgtgatgattgcattcacctcacggagtggagcattcctattgacagagcagtttggaaacactcttgttgtagaatctgctagtggagatttggagcgctttgaggcctatggcagtaaagggaagagcttcacataaaatcaagacagaagcattctcagaaaatactttgtgatgattgagtttaacacacagagctgaacattcctttggatggagcaggtttgaaacacactttctctagaatctgcgagtggatatttggacctctctgaggatttcgttggaaacgggataactgcacctaactaaacggaagcattctcacaaaattcttcgtgatgtttgcattcaaatcccagagttgaaccttcctttgatagttcagctttgaaacactctttttgtaggatctgcaagtggatatttggaccactctttggccttccttcgaaacgggtacatcttcaaataaaatctagacagaagccttctcagaaacttctctgtgacgattgcattcaactcaaagcgttgaaacgtcctatggatagagcagttttgaatctctctttttgtggaatctgcaagtggatatgtggtcctctttgaagatgtctttggaaacgggaatatcttcacattaaaactaaacagaagcattctcagaaacttctctgtgatgtttgtgttcaactcccagagtttcatgttgcttttcatagagcagatgagaaacatgcttttcgtagggtctgcaagtggacatttggagagatttccggcctgtggtggaaaacgaattatcgtcacataaaaactagagagaagcattgtcagaaacttgtttgtgatgactgcattccactcacagagttgaaggttccttttcaaacagcagtttccaaacactctttctgtggcatctgcaagtggatgtttgggcctctttgaagatttcgttggaaacgggataatcttcacagaaaagctaaacagaagcattctcagaaacttccttgtgatgtttgctttcaactcacagatttgaactttccttttgagagagaagctttgaaacactctttttctagaacctgcaagtggatatttggagggctttgaggcctgaggtggaaaaggaattatattcccgtaagaactagatagatgcattctcagaaactactttgtgacgattgcattcaagtcacagaggtgaacattccctttcacagagcactttggaaactctcgttgtgtagaatctgcaagtggagatatggaccgctttgaggcctatggtagtaaaggaaacagcttcatataaaaactagacagcagcattctcagaaaactctttgtgacgactgagtttaactcacagggctgaacattcctttggatggagcagtttggaaacacactatctgtaggatctgcaagcggatacttgggcctctctgaggattttgttggaaacgggataaaccgcacagaactaaacagaagcattctcagaaccttcttcgtgatgtttgcattcaacccacagtgttgaacctttctttgatagttcaggtttgaaacactctttttgtagaaactgcaagtggataactgcacttctttgaggcctatcgtagtaaaggaaataacttcctataaaaacaagagagaagctttctcagaaaattctctgggatgattgagttgaactcacagagcagtactttccttgggatggagtagtttcgaaacacactttctgtagaatctgcaagtggatatttggacctgtctgaggaattcgttgcaaactggataatttcagctaagtaaacagaagcagtctcagaatcttcttgtgatgtttgcattcaaatcccagaattgaaccttcctttgaaagttcaggtttgaaacactctttttgcaggatctacaagtggatattcggaccactctgtggacttcgttcgaaacgggtatatcttcacataacatctagacagaagcattctcagaaacttttctgtgatgactgcattcaactcacagagttgaacactccttttgagagcgcagttttgaaactctctttctctggaatctgcaaggggacatgcagacctctttgaaggtttcgttggaaacggaatcatcttcacataaaaattacacagaagcaccctcaggaactccttggtgatgtttgtattcaacttccagagttgaactttccttcggaaagagcagctatgaaacactctttttctagaatctgcaagtggacattgggagggctgtgaggtttgtggtggaaaaggaaatatgtccacgtaaacactagatagaagccttctcagaaactactttgtgatgatggcattcacctcacggagttgagcattcctattgacagagcagtttggaaacactcttcttgtagaatcggctagtggagatttggagcgctttgaggcctatggtagtaaagggaagagcttcccataaaatctagacagaagcattctcagaaaatactttgtgatgattgagtttaacacacagagctgaacattcctttggatggagaaggtttgaaacacaatttctgtagaatctgcgagtggatatttggacctctctgaggatttcgttggaaacgggataactgcacctaactaaacggaagcattctcacaaaattctttgtgatgtttgcattcaaatcccagagttgacccttcctttgatagttcagctttgaaacactctttttggaggatctgaaagtggatatttggaccactctttggccttcgttcgaaacgggtacatcttcaaataaaatctagacagaagccttctcagaaacttctctgtgacgattgcattcaactcaaagcgttgaaccctccctatggatagagcagttttgaatctctctttttgtggaatctgcaagtggatatgtggtcctctttgaagatgtctttggaaacgggaatatcttcacataaaaactaaacagaagcattctcagaaacttctctgtgatgtttgtgttcaactcacagagtttcacgttgcttttcatagagcagatgagaaacatgcttttcgtagggtctgcaagtggacatttggagagatttcaggcctgtggtggaaaacgaattatcgtcacgtaaaaacagagagaagcattgtcagaaacttgtttgtgatgactgcattcctctcaaagagttgaagattccttttcaaacagcagtttccaaacactctttctgtggcatctgcaagtggatgtttgggcctctttgaagatttcgttggaaacgggataatcttcacagaaaagctaaacagaagcattctcagaaacttctttgtgatgtttgctttcaactcacagagttgaactttccttttgagagagaagctttgaaacactctttttctagaatctgcaagtggatatttggagggctttgaggcctgaggtggaaaaggaattatcttcccgtaagaactagatagatgcattctcagaaactactttgtgacgattgcattcaagtcacagaggtgaacattccctttcagagagcactttggaaactctcgttgtgtagaatctgcaagtggagatatggaccgctttgaggcctatggtagtaaaggaaacagcttcatataaaaactagacagccagcattctcagaaaactctttgtgacgactgagtttaactcacagggctgaacattcctttggatggagcagtttggaaacacactatctgtaggatctgcaagcggatacttgggcctctctgaggatttcgttggaaacgggataaaccgcacagaactaaacagaagcattctcagaaccttcttcgtgatgtttgcattcaacccacagtgttgaacctttctttgatagttcaggtttgaaacactctttttgtagaaactgcaagtggataactgcacttctttgaggcctatcgtagtaaaggaaataacttcctataaaaacaagacagaagctttctcagaaaattctctgggatgattgagttgaactcacagagcagtactttccttgggatggagtagtttcgaaacacactttctgtagaatctgcaagtggatatttggacctgtctgaggaattcgttgcaaacgggataatttcacctaagtaaacagaagcagtctcagaatcttcttgtgatgtttgcattcaaatcccagaatggaaccttcctttgaaagttcaggttggaaacactctttttgcaggatctacaagtggatattcggaccactctgtggacttcgttcgaaacgggtatatcttcacataacatctagacagaagcattctcagaaacttttctgtgatgactgcattcaactcacagagttgaacactccttttgagagcgcagttttgcaactctccttctctggaatctgcaaggggacatgcagacctctttgaaggtttcgttggaaacggaatcatcttcacataaaaattacacggaagcatcctcaggaactccttggtgatgtttgtattcaacttccagagttgaactttccttcgcaaagagcagctatgaaacactctttttctagaatctgcaagtggacattgggagggctgtgaggtttgtggtggaaaaggaaatatctccacataaatactagatagaagccttctcagaaactcctttgtgatgattgcattcacctcacggagtggagcattcctattgacagagcagtttggaaacactcttgttgtagaatctcctagtggagatttggagcgctttgaggcctatggtagtaaagggaagagcttcacataaaatctagacagaagcattctcagaaaatactttgtggtgattgagtttaacacacagagctgaacattcctttggatggagaaggtttgaaacacactttctgtagaatctgcgagtggatatttggacctctctgaggatttcgttggaaacgggataactgcacctaactaaacggaagcattctcacaaaattcttcgtgatgtttgcattcaaatcccagagttgaaccttcctttgatagttcagctttgaaacactctttttgtaggatctgcaagtggatatttggaccactctttggccttccttcgaaacggctacatcttcatataaaatctagacagaagccttctcagaaacttctctgtgatgattgcattcaactcaaagcgttgaaccctcctatggatagagcagtttcgaatctctctttttgtggaatctgcaagtggatatgtggtcctctttgaagatgtctttggaaacgggaatatcttcacataaaaactaaacagaagcattctcagaaacttctctgtgatgtttgtgttcaactcacagagtttcacgttgcttttcatagagcagatgagaaacatgcttttcgtagggtctgcaagtggacatttggagagatttcaggcctgtggtggaaaacgaattatcgtcacgtaaaaactagagagaagcattgtcagaaacttgtttgtgatgactgcattcaactcacagagttgaaggttccttttcaaacagcagtttccaaacactctttctgtggcatctgcaagtggatgtttgggcctctttgaagatttcgttggaaacgggataatcttcacagaaaagctaaacagaagcattctcagaaacttcccttgtgatgtttgctttcaactcacagagttgaactttccttttgagagagaagctttgaaacactctttttctagaacctgcaagtggatatttggagggctttgaggcctgaggtggaaaaggaattatattcccgtaagaactagatagatgcattctcagaaactactttgtgacgattgcattcaagtcacagaggtgaacattccctttcacagagcactttggaaactctcgttgtgtagaatctgcaagtggagatatggaccgctttgaggcttatggtagtaaaggaaacagcttcatataaaaactagacagcagcattctcagaaaactctttgtgacgactgagtttaactcacagggctgaacattcctttggatggagcagtttggaaacacactatctgtaggatctgcaagcggatacttgggcctccctgaggatttcgttggaaacgggataaaccgcacagaactaaacagaagcattctcagaaccttcttcgtgatgtttgcattcaacccacagtgttgaacctttctttgatagttcaggtttgaaacactctttctgtagaaactgcaagtggataactgcacttctttgaggcctatcgtagtaaaggaaataacttcctataaaaacaagacagaagctttctcagaaaattctctgggatgattgagttgaactcacagagcagtactttccttgggatggagtagtttcgaaacacactttctgtagaatctgcaagtggatatttggacctgtctgaggaattcgttgcaaacgggataatttcagctaagtaaacagaagcagtctcagaatcttcttgtgatgtttgcattcaaatcccagaattgaaccttcctttgaaagttcaggttggaaacactctttttgcaggatctacaagtggatattcggaccactctgtggacttcgttcgaaacgggtatatcttcacataacatctagacagaagcattctcagaaacttttctgtgatgactgcattcaactcacaaagttgaacactccttttgagagcgcagttttgaaactctctttctctggaatctgcaaggggacatgcacacctctttgaaggtttcgttggaaacggaatcatcttcacataaaaattacacagaagcattctcaggaactccttggtgatgtttgtattcaacttccagagttgaactttccttcagaaagagcagctatgaaacactctttttctagaatctgcaagtggacattgggagggctgtgaggtttgtggtggaaaaggaaatatctccacataaatactagatagaagccttctcagaaactactttgtgatgattgcattcacctcacggagtggagcattcctattgacagagcagtttggaaacacccttgttgtagaatctgctagtggagatttggagcgctttgaggcctatggtagtaaagggaagagcttcacataaaatgtagacagaagcattctcagaaaatactttgtgatgattgagtttaacacacagagctgaacattcctttggatggagaaggtttgaaacacactttctgtagaatctgcgagtggatatttggacctctctgaggatttcgttggaaacgggataactgcacctaactaagcggaagcattctcacaaaattcttcgtgatgtttgcattcaaatcccagagttgaactttcctttgatagttcagctttgaaacaccctttttgtaggatctgcaagtggatatttggaccactatttggccttcgttcgaaacgggtacatcttcaaataaaatttagacagaagccttctcagaaacttctctgtgacgattgcattcaactcaaagcgttgtaccctcctatggatagagcagttttgaatctctctttttgtggaatctgcaagtggatatgtggtcctctttgaagatgtctttggaaacgggaatatcttcacataaaaactaaacagaagcattctcagaaacttctctgtgatgtttgtgttcaactcacagagtttcacgttgcttttcatacagcagatgagaaacatgcttttcgtagggtctgcaagtggacatttggagagatttcaggcctgtggtggaaaacgaattatcgtcacgtaaaaactagagagaagcattgtcagaaacttgtttgtgatgactgcattcaactcacagagttgaaggttccttttcaaacagcagtttccaaacactctttctgtggcatctgcaagtggatgtttgggcctctttgaagatttcgttggaaacgggatactcttcacagaaaagctaaacagaagcattctcagaaacttctttgtgatgtttgctttcaactcacagagttgaactttccttttgagagagaagctttgaaacactctttttctagaatctgcaagtggatatttggagggctttgaggcctgaggtggaaaaggaattatcttcccgtaagaaccagatagatgcattctcagaaactactttgtgacgattgcattcaagtcacagaggtgaacattccctttcagagagcactttggaaactctcgttgtgtagaatctgcaagtggagatatggaccgctttgaggcctatggtagtaaaggaaacagcttcatataaaaactagacagcagcattctcagaaaactctttgtgacgactgactttaactcacagggctgaacattcctttggatggagcagtttggaaacacactatctgtaggatctgcaagcggatacttgggcctccctgaggatttcgttggaaacgggataaaccgcacagaacttaacagaagcattctcagaaccttcttcatgacgtttgcattcaacccacagtgttgaacctttctttgagagttcaggtttgaaacactctttttgtagagactgcaagtggataactgcacttctttgaggcctatcgtagtaaaggaaataacttcctataaaaacaagacagaagctttctcagaaaattctctgggatgattgagttgaactcacagagcagtactttccttgggatggagtagtttcgaaacacactttctgtagaatctgcaagtggatatttggacctgtctgaggaattcgttgcaaacgggataatttcagctaagtaaacagaagcagtctcagaatcttcttgtgatgtttgcattcaaatcccagaattgaaccttcctttgaaagttcaggttggaaacactctttttgcaggatctacaagtggatattcggaccactctgtggacttcgttcgaaacgggtatatcttcacataacatctagacagaagcattctcagaaacttttctgtgatgactgcattcaactcacagagttgaacactccttttgagagcgcagttttgaaactctctttctctggaatctgcaaggggacatgcagacctctttgaaggtttcgttggaaacgggaatcatcttcacataaaaattacacagaggcattctcaggaactccttggtgatgtttgtattcaacttccagagttgaactttccttcggaaagagcagctatgaaacactctttttctagaatctgcaagtggacattgggagggctgtgaggtttgtggtggaaaaggaaatatctccacgtaaatactagatagaagcattctcagaaactgctttgtgatgattgcattcacctcacagagttgaacattcctattgatagagcagtttggaaacactcttgttgtggaatgtgcaagtggagatttggagcgctttgaggcctatggtagtaaagggaatagcttcatagaaaaactagacaaaagcattctcagaaaatactttgtgatgattgagtttaaatcacagagctgaacattcctttggatggagcaggtttgagacacactttttgtagaatctacaagtggatatttggacctctctgaggatttcgttggaaacgggataactgcacctaactaaacggaagcattctcacaaaattctttgtgatgtttgcattcaaatcccagagttgaaccttcctttgatagttcagctttgaaacactctttttgtaggatctgcaggtggatatttggaccactctttggccttcgttcgaaaagggtacatcttcaaataaaatctagacagaagccttctcagaaacttctctgtgacgattgcattcaactcaaagcgttgaaccctcctatggatagagcagttttgaatctctctttttgtggaatctgcaagtggatatgtggtcctctttgaagatgtctttggaaacgggaatatcttcatattaaaactaaacagaagcattctcagaaacttctctgtgatgtttgtgtccaaatcacagagtttcacgttgcttttcatagagcagatgagaaacatgcttttcgtagggtctgcaagtggacatttggagagatttcaggcctgtggtggaaaacgaattatcgtcacgtaaaaactagagggaagcattgacagaaacttgtttgtgatgactgcattcaactcacagagttgaaggttccttttcaaacagcagtttccaaacactctttctgtggcatctgcaagtggatgtttgggcctctttgaagatttcgttggaaacgggatactcttcacagaaaagctaaacagaagcattctcagaaacttctttgtgatgtttgctttcaactcacagagttgaactttccttttgagagagaagctttgaaacactctttttctagaatctgcaagtggatatttggagggctttgaggcctgtggtggaaaacgaattatcttcccgtaagaactagatagatgcattctcagaaactactttgtgacgattgcattcaagtcacagaggtgaacattccctttcacagagcactttggaaactctcgttgtgtagaatctgcaagtggagatatggaccgctttgaggcctatggtagtaaaagaaacagcttcatataaaaactagacagcagcattctcagaaatctctttgtgacgactgagtttaactcacagggctgaacattcctttggatggagcagtttggaaacacactatctgtaggatctgcaagcggatacttgggcctccctgaggatttcgttggaaacgggataaaccgcacagaactaaacagaagcattctcagaaccttcttcgtgatgtttgcattcaacccacagtgttgaacctttctttgatagttcaggtttgaaacactctttttgtagaaactgcaagtggataactgcacttctttgaggcctatcgtagtaaaggaaataacttcctataaaaacaagacagaagctttctcagaaaattctctgggatgattgagttgaactcacagagcactactttccttgggatggagtagtttcgaaacacactttctgtagaatctgcaattggatatttggacctgtctgaggaattcgttgcaaacgggataatttcagctaagtaaacagaagcagtctcagaatcttcttgtgatggttgcattgaaatcccagaattgaaccttcctttgaaagttcaggttggaaacactctttttgcaggatctacaagtggatattcggaccactctgtggacttcgttcgaaacgggtgtatcttcacataacatctagacagaagcattctcagaaacttttctgtgatgactgcattcaactcacagagttgaacactccttttgagagcgcagttttgaaactctctatctctggaatctgcaaggggacatgcagacctctttgaagatttcgttggaaacggaatcatcttcacataaaaattacacagaagcattctcaggaactccttggtgatgtttgtattcaacttccagagttgaactttccttcggaaagagcagctatgaaacactctttttctagaatctgcaagtggacattgggagggctgtgaggtttgtggtggaaaaggaaatatctccacgtaaatactagatagaagccttctcagaaactactttgtgatgattgcattcacctcacggagtggagcattcctattgacagagcagtttggaaacactcttgttgtagaatctgctagtggagatttggtgcgctttgaggcctatggtagtaaagggaagagcttcacataaaatctagacagaagcattctcagaaaatactttgtgatgattgagtttaacacacagagctgaacattcctttggatggagaaggtttgaaacacactttctgtagaatctgcgagtggatatttggacctctctgaggatttcgttggaaacgggataactgcacctaactaaacggaagcattctcacaaaattctttgtgatgtttgcattcaaatcccagagttgaaccttcctttgatagttcagctttgaaacactctttttgtaggatctgcaggtggatatttggaccactctttggccttcgttcgaaacgggtacatcttcaaataaaatctagacagaagccttctcagaaacttctctgtgatgattgcaatcaactcacagagttgaaccctcctatggataaagcagttttgaatctctctttttgtggaatctgcaagtggatatatggacctctttgaagatgcctttggaaacgggaatatcttcacataaaaactaaacagaagcattctcagaaacttctctgtgatgtttgtgttcaactcacagagtttcacgttgcttttcatagagcagatgagaagcatgcttttcgtagggtctgcaagtggacatttggagagatttcaggcctgtggtggaaaacgaattatcgtcacgtaaaaactagagagaagcattgtcagaaacttgtttgtgatgactgcattcaactcacagagttgaaggttccttttcaaacagcagtttccaaacactctttctgtggcatctgcaagtggatgtttgggcctctttgaagatttcgttggaaacgggatactcttcacagaaaagctaaacagaagcattctcagaaacttctttgtgatgtttgctttcaactcacagagttgaactttccttttgagagagaagctttgaaacactctttttctagaatctgcaagtggatatttggagggctttgaggcctgaggtggaaaaggaattatcttcccgtaagaactagatagatgcattctcagaaactactttgtgacgattgcattcaagtcacagaggtgaacattccctttcagagagcactttggaaactctcgttgtgtagaatctgcaagtggagatatggaccactttgaggcctatggtagtaaaggaaacagcttcatataaaaactagacagcagcattctcagaaaactctttgtgacgactgagtttaactcacagggctgaacattcctttggatggagcagtttggaaacacactatctgtaggatctgcaagcggatacttgggcctccctgaggatttcgttggaaacgggataaaccgcacagaactaaacagaagcattctcagaaccttcttcgtgatgtttgcattcaacccacagtgttgaacctttctttgatagttcaggtttgaaacactctttctgtagaaactgcaagtggataactgcacttctttgaggcctatcttagtaaaggaaataacttcctataaaaacaagacagaagctttctcagaaaattctctgggatgattgagttgaactcacagagcagtactttccttgggatggagtagtttcgaaacacactttctgtagaatctgcaagtggatatttggacctgtctgaggaattcgttgcaaacgggataatttcagctaagtaaacagaatcagtctcagaatcttcttgtgatgtttgcattcaaatcccagaattgaaccttcctttgaaagttcaggctggaaacactctttttgcagggtctacaagtggatattcggtcctctctgtggacttcgttcgaaacgagtatatcttcacataacatctagacagaagcagtctcagaaacttttctgtgatgactgcattcaactcacagagttgaacactccttttgagagcgcagttttgaaactctctttctctggaatctgcaaggggacatgcagacctctttgaaggtttcgttggaaacggaatcatcttcacataaaaattacacagaagcatcctcaggaactccttggtgatgtttgtattcaacttccagagttgaactttccttcggaaagagcagctatgaaacactctttttctagaatctgcaagtggacattgtgggggctgtgaggtttgtggtggaaaaggaaatatctccacataaatactagatagaagccttctcagaaactactttgtgatgattgcattcacctcacggagtggagcattcctattgacagagcagtttggaaacactcttgttgtagaatctgctagtggagatttggagcgctttgaggcctatggtagtaaagggaagagcttcacataaaatctagacagacgcattctcagaaaatactttgtgatgattgagtttaacacacagagctgaacattcctttggatggagaaggtgtgaaacacactttctgtagaatctgcgagtggatatttggacctctctgaggatttcgttggaaacgggataactgcacctaactaaacggaagcattctcacaaaattctttgtgatgtttgcattcaaatcccagagttgaaccttcctttgatagttcagctttgaaacactctttttgtaggatctgcaggtggatatttggaccactctttggccttcgttcgaaaagggtacatcttcaaataaaatctagacagaagccttctcagaaacttctctgtgacgattgcattcaactcaaagcgttgaaccctcctatggatagagcagttttgaatctctctttttgtggaatctgcaagtggatatgtggtcctctttgaagatgtctttggaaacgggaatatcttcacataaaaactaaacagaagcattctcagaaacttctctgtgatgtttgtgttcaactcacagagtttcacgttgcttttcatagagcagatgagaaacatgcttttcgtagggtctgcaagtggacatttggagagatttcaggcctgtggtggaaaacgaattatcgtcacgtaaaaactagagagaagcattgtcagaaacttgtttgtgatgactgcattcaactcacagagttgaaggttccttttcaaacagcagtttccaaacactctttctgtggcatctgcaagtggatgtttgggcctctttgaagatttcgttggaaacgggataatcttcacagaaaagctaaacagaagcattctcagaaacttctttgtgatgtttgctttcaactcacagagttgaactttccttttgagagagaagctttgaaacactctttttctagaatctgcaagtggatatttggagggctttgaggcctgaggtggaaaaggaattatcttcccgtaagaactagatagatgcattctcagaaactactttgtgacgattgcattcaagtcacagaggtgaacattccctttcagagagcactttggaaactctcgttgtgtagaatctgcaagtggagatatggaccgctttgaggcctatggtagtaaaggaaacagcttcatataaaaactagacagcagcattctcagaaaactctttttgacgactgagtttgactcacagggctgaacattcctttggatggagcagtttggaaacacactatctgtaggatctgcaagcggatacttgggcctctctgaggatttcgttggaaaagggatacaccgcacagaactaaacagaagcattctcagaaccttcttcgtgatgtttgcattcaacccacagtgttgaacctttctttgatagttcaggtttgaaacactctttttgtagaaactgcaagtggataactgcacttctttgaggcctatcgtagtaaaggaaataacttcctataaaaacaagacagaagctttctcagaaaattctctgggatgattgagttgaactcacagggcagtactttccttgggatggagtagtattgaaacacactttctgtagaatctgcaagtggatatttggacctgtctgaggaattcgttgcaaacgggataatttcagctaagtaaacagaagcagtctcagaatcttcttgtgatgtttgcattcaaatcccagaattgaaccttcctttgaaagttcaggttggaaacactctttttgcaggatctacaagtggatattcggaccactctgtggacttcgttcgaaacgggtatatcttcacataacatctagacagaagcattctcagaaacttttctgtgatgactgcattcaactcacagagttgaacactccttttgagagcgcagttttgaaactctctttctctggaatctgcaaggggacatgcagacctctttgaaggtttcgttggaaacggaatcatcttcacataaaaattacacagaagcattctcaggaactccttggtgatgtttgtattcaacttccagagttgaactttccttcggaaagagcagctatgaaacactctttttctagaatctgcaagtggacattgggagggctgtgaggtttgtggtggaaaaggaaatatctccgcataaatactagatagaagccttctcagaaactactttgtgatgattgcattcacctcacggagtggagcattcctattgacagagcagtttggaaacactcttgttgtagaatctgctagtggagatttggagcgctttgaggcctatggtagtaaagggaagagcttcacataaaatctagacagaagcattctcagaaaatactttgtgatgattgagtttaacacacagtagctgcacattcctttggatggagaaggtttgaaacacactttctgtagaatctgcgagtggatatttggaactctctgaggatttcgttggaaacgggataactgcacctaactaaacggaagcattctcacaaaattctttgtgatgtttgcattcaaatcccagagttgacccttcctttgatagttcagctttgaaacactctttttgtaggatctgcaagtggatatttggaccactctttggccttcgttcgaaacgggtacatcttcaaataaaatctagacagaagccttctcagtaacttctctgtgacgattgcattcaactcaatgcgttgaaccctcctatggatagagcagttttgaatctctctttttgtggaatcttcaagtggatgtgtggtcctctttgaagatgtctttggaaacgggaatatcttcacataaaaactaaacagaagcattctcagaaacttctctgtgatgtttgtgttcaactcacagagtttcacgttgcttttcatagagcagatgagaaacatgcttttcgtagggtctgcaagtggacatttggagagctttcaggcctgtggtggaaaacgaattatcgtcacgtaaaaactagagagaagcattgtcagaaacttgtttgtgatgactgcattcaactcacagagttgaaggttccttttcaaacagcagtttccaaacactctttctgtggcatctgcaagtggatgtttgggcctctttgaagatttcgttggaaacgggataatcttcacagaaaagctaaacagaagcattctcagaaacttctttgtgatgtttgctttcaactcacagagttgaactttccttttgagagagaagctttgaaacactctttttctagaatctgcaagtggatatttggagggctttgaggcctgaggtggaaaaggaattatcttcccgtaagaactaggtagatgcattctcagaaactactttgtgacgattgcattcaagtcacagaggtgaacattccctttcagagagcactttggaaactctcgttgtgtagaatctgcaagtggagatatggaccgctttgaggcctatggtagtaaaggaaacagcttcatataaaaactagacagcagcattctcagaaaactctttgtgacgactgagtttaactcacagggctgaacattcctttagatggagcagtttggaaacacactatctgtaggatctgcaagcggatacttgggcctccctgaggatttcgttggaaacgggataaaccgcacagaactaaacagaagcattctcagaaccttcttcgtgatgtttgcattcaacccacagtgttgaacctttctttgatagttcaggtttgaaacactcttttcgtagaaactgcaagtggataactgcacttctttgaggcctatcgtagtaaaggaaataacttcctataaaaacaagacagaagctttctcagaaaattctctgggatgattgagttgaactcacagagcagtactttccttgggatggagtagtttcgaaacacactttctgtagaatctgcaagtggatatttggacctgtctgaggaattcgttgcaaacgggataatttcagctaagtaaacagaagcagtctcagaatcttcttgtgatgtttgcattcaaattccagaattgaaccttcctttgaaaattcaggttggaaacactctttttgcaggatctacaagtggatattcggaccactctgtggacttcgttcgaaacgggtatatcttcacataacatctagacagaaagcattctcagaaacttttctgtgatgactgcattcaactcacagagttcaacactccttttgagagcgcagtttggaaactctctttctctggaatctgcaaggggacatgcagacctctttgaaggtttcattggaaacggaatcatcttcacataaaaattacacagaagcattctcaggaactccttggtgatgtttgtattcaacttccagagttgaactttccttcggaaagagcagctatgaaacactctttttctagaatctgcaagtggacattgggagggctgtgaggtttgtggtggaaaaggaaatatctccacataaatactagatagaagccttctcagaaactactttgtgatgattgcattcacctcacggagtggagcattcctattgacagagcagtttggaaacactcttgttgtagaatctgctagtggagatttggtgcgctttgaggcctatggtagtaaagggaagagcttcacataaaatctagacagaagcattctcagaaaatactttgtaatgattgagtttaacacacagagctgaacattcctttggatggagcaggtttgaaacacactttctgtagaatctgcgagtggatatttggacctctctgaggatttcgttggaaacgggattactgcacctaactaaacggaagcattctcacaaaattctttgtgatgtttgcattcaaatcccagagttgaaactgcctttgatagttcagctttgaaacactctttttgtaggatctgcaggtggatatttggaccactctttggccttcgttcgaaacgggtacatcttcaaataaaatctagacagaagccttctcagaaacttctctgtgacgattgcattcaactcagagagttgaaccctcctatggatagagcagttttgaatctctctttttgtggaatctgcaagtggatatgtggtcctctttgaagatgtctttggaaacgggaatatcttcacataaaaactaaacagaagcattctcagaaacttctctgtgatgtttgtgttcaactcacagagtttcacgttgcttttcatagagcagatgagaaacatgcttttcgtagggtctgcaagtggacatttggagagatttcaggcctgtggtggaaaacgaattatcgtcacgtaaaaactagagagaagcattgtcagaaacttgtttgtgatgactgcattcaactcacagagttgaaggttccttttcaaacagcagtttccaaacactctttctgtggcatctgcagtggatgtttgggcctctttgaagatttcgttggaaacgggataatcttcacagaaaagctaaacagaagcattctcagaaacttctttgtgatgtttgctttcaactcacagagttgaactttccttttgagagagaagctttgaaacactctttttctagaatctgcaagtggatatttggagggctttgaggcttgaggtggaaaaggaattatcttcccgtaagaactaggtagatgcattctcagaaactactttgtgacgattgcattcaagtcacagaggtgaacattccctttcagagagcactttggaaactctcgttgtgtagaatctgcaagtggagatatggaccgctttgaggcctatggtagtaaaggaaacagcttcatataaaaactagacagcagcattctcagaaaactctttgtgacgactgagtttaactcacagggctgaacattcctttggatggagcagtttggaaacacactatctgtaggatctgcaagcggatacttgggcctctctgaggatttcgttggaaacggaataaaccgcacagaactaaacagaagcattctcagaaccttcttcgtgatgtttgcattcaacccacagtgttgaacctttctttgatagttcaggtttgaaacactctttttgtagaaactgcaagtggataactgcacttctttgaggcctatcgtagtaaaggaaataacttcctataaaaacaagacagaagctttctcagaaaattctctgggatgattgagttgaactcacagagcagtactttctttgggatggagtagtttcgaaacacactttctgtacaatctgcaagtggatatttggacctgtctgaggaattcgttgcaaacgggataatttcagctaagtaaacagaagcagtctcagaatcttcttgtgatgtttgcattcaaatcccagaatggaaccttcctttgaaagttcaggttggaaacactctttttgcaggatctacaagtggatattcggaccactctgtggacttcgttcgaaacgggtatatcttcacataacatctagacagaagcattctgagaaacttttctgtgatgactgcattcaactcacagagttgaacactccttttgagagcgcagttttgaaactctctttctctggaatctgcaaggggacatgcagacctctttgaaggtttcgttggaaatggaatcatcttcacataaaaattacacagaagcatcctcaggaactccttggtgatgtttgtattcaacttccagagttgaactttccttcggaaagagcagctatgaaacacactttttctagaatctgcaagtggacattgggagggctgtgaggtttgtggtggaaaaggaaatatctccacgtaaatactagatagaagccttctcagaaaactactttgtgatgattgcattcacctcacgggagtggagcattcctattgacagagcagtttggaaacactcttcttgtagaatcggctagtggagatttggagcgctttgaggcctatggtagtaaagggaagagcttcacataaaatctagacagaagcattctcagaaaatactttgtgatgattgagtttaacacacagagctgaacattcctttggatggagaaggtttgaaacacactttctatagaatctgcgagtggatatttggacctctctgaggatttcgttggaaacgggataactgcacctaactaaacggacgttctcacaaaattctttgtgatgtttgcattcaaatcccagagttgaaccttcctttgatagttcagctttgaaacactctttttgtaggatctgcaggtggatatttggaccactctttggccttcgttcgaaacgggtacatcttcaaataaaatctagacagaagccttctccgaaacttctctgtgacgattgcattcaactccaagcgttgaaccctcctatggatagagcagttttgaatctctcttttcgtggaatctgcaagtggatatgtggtcctctttgaagatgtctttggaaacgggaatatgttcacataaaaactaaacagaagcattctcaggaaacttctctgtgatgtttgtgttcaactcacagagtttcacgttgcttttcatagagcagatgagaaacatgcttttcgtagggtctgcaagtggacatttggagagatttcaggcctgtggtggaaaacgaattatcgtcacgtaaaaactagagggaagcattgtcagaaacttgtttgtgatgactgcattcaactcacagagttgaaggttccttttcaaacagcagtttccaaacactctttctgtggcatctgcaagtggatgtttgggcctctttgaagatttcgttggaaacgggataatcttcacagaaaagctaaacagaagcattctcagaaacttccttgtgatgtttgctttcaactcacagagttgaactttccttttgagagagaagctttgaaacactctttttctagaatctgcaagtggatatttggagggctttgaggcctgtggtggaaaacgaattatcttcccgtaagaactagatagatgcattttcagaaactactttgtgacgattgcattcaagtcacagaggtgaacattccctttcacagagcactttggaaactctcgttgtgtagaatctgcaagtggagatatggaccgctttgaggcctatggtagtaaaggaaacagcttcgtataaaaactagacagcagcattctcagaaaactctttgtgacgactgagtttaactcacagggctgaacattcctttggatggagcagtttggaaacacactatctgtaggatctgcaagcggatacttgggcctctctgaggatttcgttggaaacgggataaaccgcacagaactaaacagaagcattctcagaaacttcttcgtgatgtttgcattcaacccacagtgttgaacctttctttgatagttcaggtttgaaacactctttttgtagaaactgcaagtggataactgcacttctttgaggcctatcgtagtaaaggaaataacttcctataaaaacaagacagaagctttctcagaaaattctctgcgatgattgagttgaactcacagagcagtactttccttgggatggagtagtttcgaaacacactttatgtagaatctgcaagtggatatttggacctgtctgaggaattcgttgcaaacgggataatttcagctaagtaaacagaagcagtctcagaatcttcttgtgatgtttgcattcaaatcccagaattgaaccttcctttgaaagttcaggtttgaaacactctttttgcaggatctacaagtggatattcggaccactctgtggacttcgttcgaaacgggtatatcttcacataacatctacacagaagcattctcagaaacttttctgtgatgactgcattcaactcacagagttgaacactccttttgagagcgcagttttgaaactctctttctctggaatctgcaaggggacatgcagacctctttgaaggtttcgttggaaacggaatcatcttcacataaaagttacacagaagcattctcaggaactccttggtgatgtttgtattcaatttccagagttgaactttccttcggaaagagcagctatgaaacactctttttctagaatctgcaagtggacattgggagggctgtgaggtttgtggtggaaatggaaatatctccacataaatactagatagaaggcttctcagaaactactttgtgatgattgcattcacctcacggagtggagcattcctattgacagagcagtttggaaacactcttgttgtagaatctgctagtggagatttggagcgctttgaggcctatggtagtaaagggaagagcttcacataaaatctagacagaagcattctcagaaaatactttgtgatgattgagtttaacacacagagctgaacattcctttggatggagaaggtttgaaacacactttctgtagaatctgcgagtggatatttggacctctctgaggatttcgttggaaacgggataactgcacctaactaaacggaagcattctcacaaaattctttgtgatgtttgcattcaaatcccagagttgaaccttcctttgatagttcagctttgaaacactctttttgtaggatctgcaggtggatatttggaccactctttggccttcgttcgaaaagggtacatcttcaaataaaatctagacagaagccttctcagaaacttctctgtgatgattgcattcaactcaaggcgttgaaccctcctatggatagggcagttttgaatctctctttttgtggaatctgcaagtggatatgtggtcctctttgaagatgtctttggaaacgggagtatcttcacataaaaactaaacagaagcattctcagaaacttctctgtgatgtttgtgttcaactcacagagtttcacgttgcttttcatagagcagatgagaaacatggttttcgtagggtctgcaagtggacatttggagagatttcaggcctgtggtggaaaacgaattatcgtcacataaaaactagagagaaacattgtcagaaacttgtttgtgatgactgcattcaactcacagagttgaaggttccttttcaaacagcagtttccaaacactctttctgtggcatctgcaagtggatgtttgggcctctttgaagatttcgttggaaacgggataatcttcacagaaaagctaaacagaagcattgtcagaaacttctttgtgatgtttgctttcaactcacagagttgaactttccttttgagagagaagctttgaaacactctttttctagaatctgcaagtggatatttggagggctttgaggcctgtggtggaaaacgaattatcttcccgtaagaactagatagatgcattctcagaaactactttgtgacgattgcattcaagtcacagaggtgaacattccctttcacagagcactttggaaactctcgttgtgtagaatctgcaagtggagatatggaccgctttgaggcctatggtagtaaaggaaacagcttcatataaaaactagacagcagcattctcagaaaaatctttctgacgactgagtgtaactcacagggttgaacattcctttggatggagcagtttggaaacacactatctgtaagatctgcaagcggatacttgggcctctctgaggattttgttggaaacgggataaaccgcacagaactaaacagaagcattctcagaaccttcttcgtgatgtttgcattcaacccacaatgttgaacctttctttgatagttcaggtttgaaacactctttttgtagaaactgcaagtggataactgcacttctttgaggcctatcgtagtaaaggaaataacttcctataaaaacaagacagaagctttctcagaaaattctctgggatgattgagttgaactcacagagcagtactttccttgggatggagtagtttcgaaacacactttctgtagaatctgcaagtggatatttggacctgtctgaggaattcgttgcaaacgggataatttcagctaagtaaacagaagcagtctcagaatcttcttgtgatggttgcattcaaatcccagaattgaaccttcctttgaaagttcaggttggaaacactctttttgcaggatctacaagtggatattcggaacactctgtggacttcgttcgaaacgggtatatcttcacataacatctagacagaagcattctcagaaacttttctgtgatgactgcattcaactcacagagttgaacactccttttgagagcgcagttttgaaactctctttctctggaatctgcaaggggacatgcagacctctttgaaggtttcgttggaaacggaatcatcttcacataaaaattacacagaagcattctcaggaactccttggtgatgtttgtattcaacttccagagttgaactttccttcggaaagagcagctatgaaacactctttttctagaatctgcaagtggacattgggagggctgtgaggtttgtggtggaaaaggaaatatctccacgtaaatactagatagaagccttctcagaaactatgttgtgatgattgcattcacctcacggagtggagaattcctattgacagagcagtttggaaacacccttgttgtagaatctgctagtggagaattggagcgctttgaggcctatggtagtaaatggaggagcttcacataaaatctagacagaagcattctcagaaaatactttgtgatgattgagtttaacacacagagctgaacattcctttggatggagaaggtttgaaacacactttctgtagaatctgcgagtggatatttggaactctctgaggatttcgttggaaacgggataactgcacctaactaaacggaagcattctcacaaaattctttgtgatgtttgcattcaaatcccagagttgaaccttcctttgatagttcagctttgaaacactctttttgtaggatctgcaagtggatatttggaccactctttggccttcgttcgaaacgggtacatcttcaaataaaatctagacagaagccttctcagaaacttctctgtgacgattgcattcaactcaaagagttgaaccctcctatggatagagcagtttttaatctctctttttgtggaatctgcaagtggatatgtggtcctctttgaagatgtctttggaaacgggaatatcttcacataaaaactaaacagaagcattctcagaaacttctctgtgatgtttgtgttcaactcacagagtttcacgttgcttttcatagagcagatgagaaacatgcttttcgtagggtctgcaagtggacatttggagagctttcaggcctgtggtggaaaacgaattatcgtcacgtaaaaactagagagaagcattgtcagaaacttgtttgtgatgactgcattcaactcacagagttgaaggttccttttcaaacagcagtttccaaacactctttctgtggcatctgcaagtggatgtttgggcctctttgaagatttcgttggaaacgggatactcttcacagaaaagctaaacagaagcattctcagaaacttctttgtgatgtttgctttcaactcacagagttgaactttccttttgagagtgaagctttgaaacactctttttctagaatctgcaagtggatatttggagagctttgaggcttgtggtggaaaagggattatcttcccgttaaaactagatagatgcattctcagaaactactttgtgacgattgcattcaagtcacagaggtgaacattccctttcacagagcactttggaaactctcgttgtgtagaatctgcaagtggagatatggaccgctttgagacctatggtagtaaaggaaacagcttcatataaaaactagacagcagcattctcagaaaactctttgtgacgactgagtttaactcacagggctgaacattcctttggatggagcagtttggaaacacactatctgtaggatctgcaagcggatacttgggcctctctgaggatttcgttggaaacgggataaaccgcacagaactaaacagaagcattctcagaaccttcttcgtgatgtttgcattcaacccacagtgttgaacctttctttgatagttcaggtttgaaacactctttttgtagaaactgcaagtggataactgcacttctttgaggcctatcgtagtaaaggaaataacttcctataaaaacaagacagaagctttctcagaaaattctctgggatgattgagttgaactcacagagcagtactttccttgggatggagtagtatcgaaacacactttctgtagaatctgcaagtggatatttggacctgtctgaggaattcgttgcaaacgggataatttcagctaagtaaacagaagcagtctcagaatcttcttgtgatgtttgcattcaaatcccagaattgaaccttcctttgaaagttcaggttggaaacactctttttgcaggatctacaagtgtatattcggaccactctgtggacttcgttcgaaacgggtatatcttcacataacatctagacagaagcattctcagaaacttttctgtgatgactgcattcaactcacagagttgaacactccttttgagagcgcagttttgaaactctctatctctggaatctgcaaggggacatgcagacctctttgaagatttcgttggaaacggaatcatcttcacataaaaattacacagaagcatcctcaggaactccttggtgatgtttgtattcaacttccagagttgaactttccttcggaaagagcagctatgaaacactctttttctagaatctgcaagtggacattgggagggctgtgaggtttgtggtggaaaaggaaatatctccacataaatactagttagaagccttctcagaaactactttgtgatgattgcattcacctcacggagtggagcattcctattgacagagcagtttggaaacactcttgttgtagaatcggcgagtggagatttggagcgctttgaggcctatggtagtaaagggaagagcttcacataaaatctagacagaagcattctcagaaaatactttgtgatgattgagtttaacacacagagctgaacattcctttggatggagaaggtttgaaacacactttctgtagaatctgcgagtggatatttggacctctctgaggatttcgttggaaacgggataactgcacctaactaaacggaagcattctcacaaaattctttgtgatgtttgcattcaaatcccagagttgaaccttcctttgatagttcagctttgaaacactctttttgtaggatctgcaagtggatatttggaccactctttggccttcgttcgaaacgggtacatattcaaataaaatctagacagaagccttctcagaaacttctctgtgacgattgcattcaactcaaagcgttgaaccctcctatggatagagcagttttgaatctctctttttgtggaatctgcaagtggatatgtggtcctctttgaagatgtctttggaaacgggaatatcttcacataaaaactaaacagaagcattctcagaaacttctctgtgatgtttgtgttcaactcacagagtttcacgttacttttcatagagcagatgagaaacatgcttttcgtagggtctgcaagtggacatttggagagctttcaggcctgtggtggaaaacgaattatcgtcacgtaaaaactagagagaagcattgtcagaaacttgtttgtgatgactgcattcaactcacagagttgaaggttccttttcaaacagcagtttccaaacactctttctgtggcatctgcaagtggatgtttgggcctctttgaagatttcgttggaaacgggataatcttcacagaaaagctaaacagaagcattctcagaaacttctttgtgatgtttgctttcaactcacagagttgaactttccttttgagagagaagctttgaaacactctttttctagaatctgcaagtggatatttggagggctttgaggcctgaggtggaaaaggaattatcttcccgtaagaactagatagatgcattctcagaaactactttgtgacgattgcattcaagtcacagaggtgaacattccctttcagagagcactttggaaactctcgttgtgtagaatctgcaagtggagatatggaccgctttgaggcctatggtagtaaaggaaacagcttcatataaaaactagacagcagcattctcagaaaactctttgtgacgactgagtttaactcacagggctgaacattcctttggatggagcagtttggaaacacactatctgtaggatctgcaagcggatacttgggcctccctgaggatttcgttggaaaagggatacaccgcacagaactaaacagaagcattctcagaaccttcttcgtgatgtttgcattcaacccacagtgttgaacctttctttgatagttcaggtttgaaacactctttttgtagaaactgcaagtggataactgcacttctttgaggcctatcgtagtaaaggaaataacttcctataaaaacaagacagaagctttctcagaaaattctctgggatgattgacttgaactcacagagcactactttccttgggatggagtagtttcgaaacacactttctgtagaatctgcaagtggatatttggacctgtctgaggaattcgttgcaaacgggataatttcagctaagtaaacagaagcagtctcagaatcttcttgtgatgtttgcattcaaatcccagaattcaaccttcctttgaaagttcaggttggaaacactctttttgcaggatctacaagtggatattcggaccactctgtggacttcgttcgaaacgggtatatcttcacataacatctagacagaagcattctcagaaacttttctgtgatgactgcattcaactcacagagttgaacactccttttgagagcgcagttttgaaactctctttctctggaatctgcaaggggacatgcagacctctttgaaggtttcgttggaaacagaatcatcttcacataaaaattacacagaagcatcctcaggaactccttggtgatgtttgtattcaacttccagagttgaactttccttcggaaagagcagctatgaaacactctttttctagaatctgcaagtggacattgggagggctgtgaggtttgtggtggaaaaggaaatatctccacataaatactagatagaagccttctcagaaactactttgtgatgattgcattcacctcacggagtggagcattcctattgacagagcagtttggaaacactcttgttgtagaatctgctagtggagatttggagcgctttgaggcctatggtagtaaagggaagagcttcacataaaatctagacagaagcattctcagaaaatactttgtgatgtttgagtttaacacacagagctgaacattcctttggatggagaaggtttgaaacacactttctgtagaatctgcgagtggatatttggacctctctgaggatttcgttggaaacgggataactgcacctaactaaacggaagcattctcacaaaattctttgtgatgtttgcattcaaatcccagagttgaaccttcctttgatagttcagctttgaaacactctttttgtaggatctgcaagtggatatttggaccactctttggccttcgttcgaaacgggtacatcttcaaataaaatctagacagaagccttctcagaaacttctctgtgacgattgcattcaactcaaagcgttgaaccctcctatggatagagcagttttgaatctctctttttgtggaatctgcaagtggatatgtggtcctctttgaagatgtctttggaaacgggaatatcttcacataaaaactaaacagaagcattctcagaaacttctctgtgatgtttgtgttcaactcccagagtttcatgttgcttttcatagagcagatgagaaacatgcttttcgtagggtctgcaagtggacatttggagagatttccggcctgtggtggaaaacgaattatcgtcacataaaaactagagagaagcattgtcagaaacttgtttgtgatgactgcattcaactcacagagttgaaggttccttttcaaacagcagtttccaaacactctttctgaggcatctgcaagtggatgtttgggcctctttgaagatttcgttggaaactggataatcttcacagaaaagctaaacagaagcattctcagaaacttctttgtgacgtttgctttcaactcacagagttgaactttccttttgagagagaagctttgaaacactctttttccagaatctgcaagtggatatttggagggctttgaggcctgaggtggaaaaggaattatcttcccgtaagaactagatagatgcattctcagaaactactttgtgacgattgcattcaagtcacagaggtgaacattccctttcagagagcactttggaaactctcgttgtgtagaatctgcaagtggagatatggaccgctttgaggcctatggtagtaaaggaaacggcttcatataaaaactagacagcagcattctcagaaaactctttgtgacgactgagttaaactcacagggctgaacattcctttggatggagcagtttggaaacacactatctgtaggatctgcaagcggatacttgggcctccctgaggatttcgtgggaaacgggataaaccgcacagaactaaacagaagcattctcagaaccttcttcgtgatgtttgcattcaacccacagtgttgaacctttctttgatagttcaggtttgaaacactctttttgtagaaactgcaagtggataactgcacttctttgaggcctatcgtagtaaaggaaataacttcctataaaaacaagacagaagctttctcagaaaattctctgggatgattgagttgaactcacagagcagtactttccttgggatggagtagtttcgaaacacactttctgtagaatctgcaagtgggtatttggacctgtctgaggaattcgttgcaaacgggataatttcagctaagtaaacagaagcagtctcagaatctccttgtgatgtttgcattcaaatcccagaattgaaccttcctttgaaagttcaggtttgaaacactctttttgcagggtctacaagtggatattcggaccactctgtggacttcgttcgaaacgggtatatcttcacataacatctagacagaagcattctcagaaacttttctgtgatgactgcattcaactcacagagttgaacactccttttgagagcgcagttttgaaactctctttctctggaatctgcaaggggacatgcagagctcattgaaggttttgttggaaacggaatcatcttcacataaaaattacacagaagcatcctcaggaactccttggtgatgtttgtattcaacttccagagttgaactttccttcggaaagagcagctatgaaacactctttttctagaatctgcaagtggacattgggagggctgtgaggtttgtggtggaaaaggaaatatctccacataaatactagatagaagccttctcagaaactactttgtgatgattgcattcacctcacggagtggagcattcctattgacagagcagtttggaaacactcttgttgtagaatctgctagtggagatttggagcgctttgaggcctatggtagtaaagggaagagcttcacataaaatctagacacaagcattctcagaaaatactttgtgatgattgagtttaacacacagagctgaacattcctttggatggagaaggtttgaaacacactttctgtagaatctgcgagtggatatttggacctctctgaggatttcgttggaaacgggataactgcacctaactaaacggaagcattctcacaaaattctttgtgatgtttgcattcaaatcccagagttgaaacttcctttgatagttcagctttgaaacactctttttgtaggatctgctggtggatatttggaccactctttggccttcgttcgaaacgggtacatcttcaaataaaatctagacagaagccttctcagaaacttctctgtgacgattgcattcaactcaaagagttgaaccctcctatggatagagcagttttgaatctctctttttgtggaatctgcaagtggatatgtggtcctctttgaagatgtctttggaaacgggaatatcttcacataaaaactaaacagaagcattctcagaaacttctctgtgatgtttgtgttcaactcacagagtttcacgttgcttttcatagagcagatgagaaacatgcttttcgtagggtctgcaagtggacatttggagagatttcaggcctgtggtggaaaacgaattatcgtcacgtaaaaactagagagaagcattgtcagaaacttgtttgtgatgactgcattcaactcacagagttgaaggttccttttcaaacagcagtttccaaacactctttctgtggcatctgcaagtggatgtttgggcctctttgaagatttcgttggaaacgggataatcttcacagaaaagctaaacagaagcatgctcaagaaacttctttgtgatgtttgctttcaactcacagagttgaactttccttttgagagagaagctttgaaacactctttttctagaatctgcaagtggatatttggagggctttgaggcctgaggtggaacaggaattatcttcccgtaagaactagatagatgcattctcagaaactactttgtgacgattgcattcaagtcacagaggtgaacattccctttcagagagcactttggaaactctcgttgtgtagaatctgcaagtggagatatggaccgctttgaggcctatggtagtaaaggaaacagcttcatataaaaactagacagcaagcattctcagaaaactctttgtgacgactgagtttaactcacagggctgaacattcctttggatggagcagtttggaaacacactatctgtaggatctgcaagcggatacttgggcctccctgaggatttcgttggaaacgggataaaccgcacagaactaaacagaagcattctcagaaccttcttcgtgatgtttgcattcaacccacagtgttgaacctttctttgatagttcaggtttgaaacactctttttgtagaaactgcaggtggataactggacttctttgaggcctatcgtagtaaaggaaataacttcctataaaaacaagacagaagctttctcagaaaattctctgggatgattgagttgaactcacagagcagtactttccttgggatggagtagtttcgaaacacactttctgtagaatctgcaagtggatatttggacctgtctgaggaattcgttgcaaacgggataatttcagctaagtaaacagaagcagtctcagaatcttcttgtgatgtttgcattcaaatcccagaattgaaccttcctttgaaagttcaggttggaaacactctttttgcaggatctacaagtggatattcggaccacactgtggacttcgttcgaaacgggtatatcttcacataacatctagacagaagcattctcagaaacttttctgtgatgactgcattcaactcacagagttgaacactccttttgagagcgcagttttgaaactctctttctctggaatctgcaaggggacatgcagacctctttgaaggtttcgttggaaagggaatcatcttcacataaaaattacacagaagcattctcaggaactccctggtgatgtttgtattcaacttccagagttgaactttccttcggaaagagcagctatgaaacactccatttctagaatctgcaagtggacattgggagggctgtgaggtttgtggtggaaaaggaaatatctccacgtaaatactagatagaagccttctcagaaactactttcagatgattgcattcacctcacggagtggagcattcctattgacagagcagtttggaaacactcttgttgtagaatctgctagtggagatttggagcgctttgaggcctatggtagtaaagggaagagcttcacataaaatcaagacagaagcattctcagaaaatactttgtgatgattgagtttaacacacagagctgaacattcctttggatggagaaggtttgaaacacactttctgtagaatctgcgagtggatattgggacctctctgaggatttcgttggaaacgggataactgcacctaactaaacggaagcgttctcacaaaattctttgtgatgtttgcattcaaatcccagagttgaaccttcctttgatagttcagctttgaaacacactttttgtagggtctgcaggtggatatttggaccgctctttggccttcattcgaaacgggtacatcttcaaataaaatctagacagaagccttctcagaaacttctctgtgacgattgcattcaactcaaagagttgaaccctcctatggatagagcagttttgaatctctctttttgtggaatctgcaagtggatatgtggtcctctttgaagatgtctttggaaacgggaatatcttcacataaaaactaaacagaagcattctcagaaacttctctgtgatgtttgtgttcaactcacagagtttcacgttgcttttcatagagcagatgagaaacatgcttttcgtaaggtctgcaagtggacatttggagagatttcaggcctgtggtggaaaacgaattatcgtcacgtaaaaactagagagaagcattgtcagaaacttgtttgtgatgactgcattcaactcacagagttgaaggttccttttcaaacagcagtttccaaacactctttctgtggcatctgcaagtggatgtttgggcctctttgaagatttcgttggaaacgggataatcttcacagaaaagctaaacagaagcatgctcagaaacttctttgtgatgtttgctttcaactcacagagttgaactttccttttgagagagaagctttgaaacactctttttctagaatctgcaagtggatatttggagggcattgaggcctgaggtggaacaggaattatcttcccgtaagaactagatagatgcattctcagaaactactttgtgacgattgcattcaagtcacagaggtgaacattccctttcagagagcactttggaaactctcgttgtgtagaatctgcaagtggagatatggaccgctttgaggcctatggtagtaaaggaaacagcttcatataaaaactagacagcagcattctcagaaaactctttgtgacgactgagttaaactcacagggctgaacattcctttggatggagcagtttggaaacacactatctgtaggatctgcaagcggatacttgggcctccctgaggatttcgtgggaaacgggataaaccgcacagaactaaacagaagcattctcagaaccttcttcgtgatgtttgcattcaacccacagtgttgaacctttctttgatagttcaggtttgaaacactctttttgtagaaactgcaagtggataactgcacttctttgaggcctatcgtagtaaaggaaataacttcctataaaaacaagacagaagctttctcagaaaattctctgggatgattgagttgaactcacagagcagtactttccttgggatggagtagtttcgaaacacactttctgtagaatctgcaagtggatatttggacctgtctgaggaattcgttgcaaacgggataatttcagctaagtaaacagaagcagtctcagaatcttcttgtgatgtttgcattcaaatcccagaattgaaccttcctttgaaagttcaggttggaaacactctttttgcaggatctacaagtggatattcggaccactctgtggactttgttcgaaacgggtatatcttcacataacatctagacagaagcattctcagaaacttttctgtgatgactgcattcaactcacagagttgaacactccttttgagagcgcagttttgaaactctctttctctggaatctgcaaggggacatgcagacctctttgaaggtttcgttggaaacagaatcatcttcacataaagattacacagaagcattctcaggcaactccttggtgatgtttgtattcaacttccagagttgaactttccttcggaaagagcagctatgaaacactctttttctagaatctgcaagtggacattgggagggctgtgaggtttgtggtggaaaaggaaatatctccacataaatactagatagaagccttctcagaaactactttgtgatgactgcattcacctcacggagtggagcattcctattgacagagcagtttggaaacactcttcttgtagaatcggctagtggagagttggagcgctttgaggcctatggtagtaaagggaagagcttcacataaaatctagacagaagcattctcagaaaatactttgtgatgattgagtttaacacacagagctgaacattcctttggatggagaaggtttgaaacacactttctgtagaatctgcgagtggatatttggacctctctgaggatttcgttggaaacgggataactgcacctaactaaacggaagcattctcacaaaattctttgtgatgtttgcattcaaatcccagagttgaaccttcctttgatagttcagctttgaaacactctttttgtaggatctgcaggtggatatttggaccactctttggccttcgttcgaaaagggtacatattcaaataaaatctagacagaagccttctcagaaacttctctgtgacgattgcattcaactcaaagcgttgaaccctcctatggatagagcagttttgaatctctctttttgtggaatctgcaagtggatatgtggtcctctttgaagatgtctttgcaaacgggaatatcttcacataaaaactaaacagaagcattctcagaaacttctctgtgatgtttgtgttcaactcacagagtttcacgttgcttttcatagagcagatgagaaacatgcttttcgtagggtctgcaagtggacatttggagagatttcaggcctgtggtggaaagcgaattatcgtcacggaaaaactagagagaagcattgtcagaaacttgtttgtgatgactgcattcaactcacagagttgaaggttccttttcaaacagcagtttccaaacactctttctgtggcatctgcaagtggatgtttgggcctctttgaagatttcgttggaaactggataatcttcacagaaaagctaaacagaagcattctcagaaacttctttgtgatgtttgctttcaactcacagagttgaactttccttttgagagagaagctttgaaacactctttttcttgaatctgcaagtggatatttggagcgctttgaggcctgtggtggaaaaggaattatcttcccacaagaactagatagatgcattctcagaaactactttgtggcgattacattcaagtcacagaggtgaacattccctttcacagagcactttggaaactctcgttgtgtagaatctgcaagtttagatatggaccgctttgaggcctatggtagtaaaggaaacagcttcatataaaaactagacagcagcattctcagaaaactctttgtgacgactgagtttaactcaaagggctgaacattcctttcgatggagcagtttggaaacacactatctctaggatctgcaagcggatacttgggcctctctgaggatttcgttggaaacgggataaaccgcacagaactaaacagaagcattctcagaactttcttcatgacgtttgcattcaacccacagtgttgaacctttctttgatagttcaggtttgaaacactctttttgtagaaactgcaagtggataactgcacttctttgaggcctatcgtagtaaaggaaataacttcctataaaaacaagacagaagctttctcagaaaattctctgggatgattgagttgaactcacagagcagtactttccttgggatggagtagtttcgaaacacactttctgtagaatctgcaagtggatatttggacctgtctgaggaattcgttgcaaacgggataatttcagctaagtaaacagaagcagtctcagaatcttcttgtgatgtttgcattcaaatcccagaattgaaccttcctttgaaagttcaggttggaaacactctttttgcaggatctacaagtggatattcggaccactctgtggacttcgttcgaaacgggtatatcttcacataacatctagacagaagcattctcagaaacttttctgtgatgactgcattcaactcacagagttgaacactcctttcgagagcgcagttttgaaactctctttctctggaatctgcaaggggacatgcagacctctttgaaggtttcgttggaaacggaatcatcttcacataaaaattacacagaagcattctcaggaactccttggtgatgtttgtattcaacttccagagttgaactttccttcggaaagagcagctatgaaacacactttctctagaatctgcaagtggacattgggagagctgtgaggtttgtggtggaaaaggaaatatctccacataaatactagatagaagccttctcagaaactactttgtgatgattgcattcacctcacggagtggagcattcctattgacagagcagtttggaaacactcttgttgtagaatctgctagtggagatttggagcgctttgaggcctatggtagtaaagggaagagcttcacataaaatctagacacaagcattctcagaaaataatttgtgatgattgagtttaacacacagagctgaacattcctttggatggagaaggtttgaaacacactttctgtagaatctgcgagtggatatttggacctctctgaggatttcgttggaaaggggataactgcacctaactaaacggaagcattctcacaaaattctttgtgatgtttgcattcaaatcccagagttgaaccttcctttgatagttcagctttgaaacactctttttgtaggttctgcaggtggatatttggaccactctttggccttcattcgaaacgggtacatcttcaaataaaatctagacagaagccttctcagaaacttctctgtgacgattgcattcaactcaaagcgttggaccctcctatggatagagcagttttgaatctctgtttttgtggaatctgcaagtggatgtgtggtcctctttgaagatgtctttggaaacgggaatatcttcacataaaaactaaacagaagcattctcagaaacttctctgtgatgtttgtgttcaactcacagagtttcacgttgcttttcatagagcagatgagaaacatgcttttcgtagggtctgcaagtggacatttggagagatttccggcctgtggtggaaaacgaattatcgtcacgtaaaaactagagagaagcattgtcagaaacttgtttgtgatgactgcattcaactcacagagttgaaggttccttttcaaagagcagtttccaaacactctttctgtggcatctgcaagtggatgtttgggcctctttgaagatttcgttggaaacgggataatcttcacagaaaagctaaacagaagcattctcagaaacttctttgtgacgtttgctttcaactcacagagttgaactttccttttgagagagaagctttgaaacactctttttctagaatctgcaagtggagatttggagggctttgaggcctgaggtggaaaaggaattatcttcccgtaagaactagatagatgcattctcagaaactactttgtgacgattgcattcaagtcacagaggtgaacattccctttcagagagcactttggaaaccctcgttgtgtagaatctgcaagtggagatatggaccgctttgaggcctatggtagtaaaggaaacagcttcatataaaaactagacagcagcattctcagaaaactctttgtgacgactgagtttaactcacagggctgaacattcctttggatggagcagtttggaaacacactatctgtaggatctgcaagcggatacttgggcctctctgaggatttcgttggaaacggaataaaccgcacagaactaaacagaagcattctcagaaccttcttcgtgatgtttgcattcaacccacagtgttgaacctttctttgatagttcaggtttgaaacactctttttgtagaaactgcaggtggataactgcacttctttgaggcctatcgtagtaaaggaaataacttcctataaaaacaagacagaagctttctcagaaaattctctgggatgattgagttgaactcacagagcagtacttttccttgggatggagtagtttcgaaacacactttctgtagaatctgcaagtggatatttggacctgtctgaggaattcgttgcaaacgggataatttcagctaagtaaacagaagcagtctcagaatcttcttgtgatgtttgcattcaaatcccagaattgaaccttcctttgaaagttcaggttggaaacactctttttgcaggatctacaagtggatattcggaccactctgtggacttcgttcgaaacgggtatatcttcacataacatctagacagaagcattctcagaaacttttctgtgatgactgcattcaactcacagagttgaacactccttttgagagcgcagttttgaaactctctttctctggaatctgcaaggggacatgcagacctcttcgaaagtttcgttggaaacggaatcatcttcacataaaaattacacagaagcattctcaggaactccttggtgatgtttgtattcaacttccagacttgaactttccttcggaaagagcagctatgaaacactctttttctagaaactgcaagtggacattgggagggctgtgaggtttgtggtggaaaaggaaatatctccacgtaaatactagatagaagccttctcagaaactactttgtgatgactgcattcacctcacggagtggagcattcctattgacagagcagtttggaaacactcttcttgtagaatcggctagtggagagttggagcgctttgaggcctatggtagtaaagggaagagcttcacataaaatctagacagaagcattctcagaaaatactttgtgatgattgagtttaacacacagagctgaacattcctttggatggagaaggtttgaaacacactttctgtagaatctgcgagtggatatttggacctctctgaggatttcgttggaaacgggataactgcacctaactaaacggaagcattctcacaaaattctttgtgatgtttgcattcaaatcccagagttgaaccttcctttgatagttcagctttgaaacactctttttgtaggatctgcaagtggatatttggaccactctttggccttcgttcgaaacgggtacatcttcaaataaaatctagacagaagccttctcagaaacttctctgtgacgattgcattcaactccaagcgttgaaccctcctatggatagagcagttttgaatctctctttttgtggaatctgcaagtggatatgtggtcctctttgaagatgtctttggaaacgggaatatcttcacataaaaactaaacagaagcattctcagaaacttctctgtgatgtttgtgttcaactcacagagtttcacgttgcttttcatagagcagatgagaaacatgcttttcgtagggtctgcaagtggacatttggagagatttcaggcctgtggtggaaaacgaattatcgtcacgtaaaaactagagagaagcattgtcagaaacttgtttgtgatgactgcattcaactcacagagttgaaggttccttttcaaacagcagtttccaaacactctttctgtggcatctgcaagtggatgtttgggcctctttgaagatttcgttggaaacgggataatcttcacagaaaagctaaacagaagcattctcagaaacttctttgtgatgtttgctttcaactcacagagttgaactttccttttgagagagaagctttgaaacactctttttctagaatctgcaagtggatatttggagggctttgaggcctgaggtggaaaaggaattatcttcccgtaagaactagatagatgcattctcagaaactactttgtgacgattgcattcaagtcacagaggtgaacattccctttcagagagcactttggaaactctcgttgtgtagaatctgcaagtggagatatggaccgctttgaggcctatggtagtaaaggaaacagcttcatataaaaactagacagcagcattctcagaaaactctttgtgacgactgagtttaactcacagggctgaacattcctttggatggagcagtttggaaacacactatctgtaggatctgcaagcggatacttgggcctccctgaggatttcgttggaaacgggataaaccgcacagaactaaacagaagcattctcagaaccttcttcgtgacgtttgcattcaacccacagtgttgaacctttctttgatagttcaggtttgaaacactctttttgtagaaactgcaagtggataactgcacttctttgaggcctatcgtagtaaaggaaataacttcctataaaaacaagacagaagctttctcagaaaattctctgggatgattgacttgaactcacagagcagtactttccttgggatggagtagtttcgaaacacactttctgtagaatctgcaagtggatatttggacctgtctgaggaattcgttgcaaacgggataatttcagctaagtaaacagaagcagtctcagaatcttcttgtgatggttgcattcaaatcccagaattgaaccttcctttgaaagttcaggttggaaacactctttttgcagtctctacaagtggatattcggaccactctgtggacttcgttcgaaacgggtataccttcacataacatctagacagaagcattctcagaaacttttctgtgatgactgcattcaactcacagagtggaacactccttttgagagcgcagttttgaaactctctttctctagaatctgcaaggggacatgcagacctctttgaaggtttcgttggaaacggaatcatcttcacataaaaattacacagaagcattctcaggaactccttggtgatgtttgtattcaacttccagagttgaactttccttcggaaagagcagctatgaaacactctttttctagaatctgcaagtggacattgggagagctgtgaggtttgtggtggaaaaggaaatatctccacataaatactagatagaagccttctcagaaactactttgtgatgattgcattcacctcacggagttgagcattcctattgacagagcagtttggaaacactcttgttgtagaataggctagtggagatttggagcgctttgaggcctatggtagtaaagggaagagcttcacataaaatctagacagaagcattctcagaaaatactttgtgatgattgagtttaacacacagagctgaacattcctttggatggagaaggtttgaaccacactttctgtagaatctgcgagtggatattgggacctctctgaggatttcgttggaaacgggataactgcacctaactaaacggaagcattctcacaaaattctttgtgatatttgcattcaaatcccagagttgaaccttcctttgatagttcagctttggaacactctttttgtaggatctgcaggtggatatttggaccactctttggccttcgttcaaaacgggtacatcttcaaataaaatctagacagaagccttctcagaaacttctctgggatgattgcattcaactcaaagcgttgaaccctcctatggatagagcagttttgaatctctctttttgtggaatctgcaagtggatatgtggtcctctttgaagttgtctttggaaacgggaatatcttcttataaaaactaaacagaagcattctcagaaacttctctgtgatgtttgtgttcaactcacagagtttcacgttgcttttcatagagcagatgagaaacatgcttttcgtagggtctgcaagtggacatttggagaactttcaggcctgtggtggaaaacgaattatcgtcacgtaaaaactagagagaaagcattgtcagaaacttgtttgtgatgactgcattcaactcacagagttgaaggttccttttcaaacagcagtttccaaacactctttctgtggcatctgcaagtggatgtttgggcctctttgaagatttcgttggaaacgggataatcttcacagaaaagctaaacagaaagcattctcagaaacttctttgtgatgtttgctttcaactcacagagttgaactttccttttgagagagaagctttgaaacactctttttctagaatctgcaagtggatatttggagggctttgaggcctgtggtggaaaaggaattatcttcccgtaagaactagatagatgcattctcagaaactactttgtgacgattgcattcaagtcacagaggtgaacattccctttcacagagcactttggaaactctcgttgtgtagaatctgcaagtggagatatggaccgctttgaggcctatggtagtaaaggaaacagcttcatataaaaactagacagcagcattctcagaaaactctttgtgacgactgagtttaactcacagggctgaacattcctttggatggatcagtttggaaacacactatctgtaggatctgcaagcggatacttgggcctccctgaggatttcgttggaaacgggataaaccgcacagaactaaacagaagcattctcagaaccttcttcgtgatgtttgcattcaacccacagtgttgaacctttctttgatagttcaggtttgaaacactctttttgtagaaactgcaagtggataactgcacttctttgaggcctatcgtagtaaaggaaataacttcctataaaaacaagacagaagctttctcagaaaattctctgggatgattgagttgaactcacagagcagtactttccttgggatggagtagtttcgaaacacactttctgtagaatctgcaagtggatatttggacctgtctgaggaattcgttgcaaacgggataatttcagctaagtaaacagaagcagtctcagaatcttcttgtgatgtttgcattcaaatcccagaattgaaccttcctttgaaagttcaggttggaaacactctttttgcaggatctacaagtggatattgggaccactctgtgaacttcgttcgaaacgggtatatcttcacataacatctagacagaagcattctcagaaacttttctgtgatgactgcattcaactcacagagttgaacactccttttgagagcgcagttttgaaactctctttctctggaatctgcaaggggacatgcagacctctttgaaggtttcgttggaaacggaatcatcttcacataaaaattacacagaagcatcctcaggaactccttggtgatgtttgtattcaacttccagagttgaactttccttcggaaagagcagctatgaaacactctttttctagaaactgcaagtggacattgggagggctgtgaggtttgtggtggaaaaggaaatatctccacataaatactagatagaagccttctcagaaactactttgtgatgattgcattcacctcacggagtggagcattcctattgacagagcagtttggaaacactcttcttgtagaatcggctagtggagatttggagcgctttgaggcctatggtagtaaagggaagagcttcacataaaatctagacagaagcattctcagaaaatactttgtgatgattgagtttaacacacagagctgaacattcctttggatggagaaggtttgaaacacactttctgtagaatctgcgagtggatatttggacctctctgaggatttcgttggaaaccggataactgcacctaactaaacggaagcattctcacaaaattctttgtgatgtttgcattcaaatcccagagttgaaccttcctttgatagttcagctttgaaacactctttttgtaggatctgcaagtggatacttggaccactctttggccttcgttcgaaacgggtacatcttcaaataaaatctagacagaagccttctcaggaacttctctgtgatgattgcattcaactcaaagagttgaaccctcctatggatagagcagttttgaatctctctttttgtggaatctgcaagtggatatgtggtcctctttgaagatgtctttggaaacgggaatatcttcacataaaaactaaacagaagcattctcagaaacttctctgtgatgtttgtgttcaactcacagagtttcacgttgcttttcatagagcagatgagaaacatgcttttcgtagggtctgcaagtggacatttggagagctttcaggcctgtggtggaaaacgaattatcgtcacgtaaaaactagagagaagcattgtcagaaacttgtttgtgatgactgcattcaactcacagagttgaaggttccttttcaaacagcagtttccaaacactctttctgtggcatctgcaagtggatgtttgggcctctttgaagatttcgttggaaacgggataatcttcacagaaaagctaaacagcagcattctcagaaacttctttgtgatgtttgctttcaactcacagagttgaactttccttttgagagagaagctttgaaacactctttttctagaatctgcaagtggatatttggagggctttgaggcctgaggtggaaaaggaattatcttcccgtaagaactagatagatgcattctcagaaactactttgtgacgattgcattcaagtcacagaggtgaacattccctttcagagagcactttggaaactctcgttgtgtagaatctgcaagtggagatatggaccgctttgaggcctatggtagtaaaggaaacagcttcatataaaagctagacagcagcattctcagaaaactctttgtgacgactgagtttaactcacagggctgaacattcctttggatggagcagtttggaaacacactatctgtaggatctgcaagcggatacttgggcctccctgaggatttcgttggaaacgggataaaccgcccagaactaaacagaagcattctcagaaccttcttcgtgatgtttgcattcaacccacagtgttgaacctttctttgatagttcaggtttgaaacactgtttttatagaaactgcaagtggataactgcacttctttgaggcctatcgtagtaaaggaaataacttcctataaaaacaagacagaagctttctcagaaaattctctgcgatgattgagttgaactcacagagcagtactttccttgggatggaatagtatcgaaacacactttctgtagaatctgcaagtggatatttggacctgtctgaggaattcgttgcaaacgggataatttcagataagtaaacagaagcagtctcagaatcttcttgtgatgtttgcattcaaatcccagaattgaaccttcctttgaaagttcaggttggaaacactctttttgcaggatctacaagtggatattcggaccactctgtggacttcgttcgaaacgggtatatcttcacataacatctagacagaagcattctcagaaacttttctgtgatgactgcattcaactcacagagttgaacactccttttgagagcgcagttttgaaactctctttctctggaatctgcaaggggacatgcagacctctttgaaggtttcgttggaaacggaatcatcttcacataaaaattacacagaagcatcctcaggaactccttggtgatgtttgtattcaacttccagagctgaactttccttcggaaagagcagctatgaaacactctttttctagaatctgcaagtggacattgggagggctgtgaggtttgtggtggaaaaggaaatatctccacataaatactagatagaagccttctcagaaactcctttgtgatgattgcattcacctcacggagtggagcattcctattgacagagcagtttggaaacactcttgttgtagaatctgctagtggagatttggagcgctttgaggcctatggtagtaaggggaagagcttcacataaaatctagacagaagcattctcagaaaatactttgtgatgattgagtttaacacacagagctgaacattcctttggatggagaaggtttgaaacacactttctgtagaatctgcgagtggatatttggacctctctgaggatttcgttggaaacgggataactgcacctaactaaacggaagcattctcacaaaattctttgtgatgtttgcattcaaatcccagagttgacccttcctttgatagttcagctttgaaacactctttttgtaggatctgcaagtggatatttggaccactctttggccttcgttcgaaacgggtacatcttcaaataaaatctagacagaagccttctcagaaacttctctgtgatgattgcattcaactcaaggcgttgaaccctcctatggatagggcagttttgaatctctctttttgtggaatctgcaagtggatatgtggtcctctttgaagatgtctttggaaacgggaatatcttcacataaaaactaaacagaagcattctcagaaacttctctgtgatgtttgtgttcaactcacagagtttcacgttgcttttcatagagcaggtgagaaacatgcttttcgtagggtctgcaagtggacatttggagagctttcaggcctgtggtggaaaacgaattatcgtcacgtaaaaactagagagaagcattgtcagaaacttgtttgtgatgactgcattcaactcacagagttgaaggttccttttcaaacagcagtttccaaacactctttctgtggcatctgcaagtggatgtttgggcctctttgaagatttcgttggaaacgggataatcttcacagaaaagctaaacagaagcattctcagaaacttctttgtgatgtttgctttcaaatcacagagttgaactttccttttgagagagaagctttgaaacactctttttctagaatctgcaagtggatatttggagggctttgaggcctgtggtggaaaaggaattatcttcccgtaagaactagatagatgcattctcagaaactactttgtgacgattgcattcaagtcacagaggtgaacattccctttcagagagcactttggaaactctcgttgtgtagaatctgcaagtggagatatggaccgctttgaggcctatggtagtaaaggaaacagcttcatataaaaactagacagcagcattctcagaaaactctttgtgacgactgagttaaactcacagggctgaacattcctttggatggagcagtttggaaacacactatctgtaggatctgcaagcggatacttgggcctccctgaggatttcgtgggaaacgggataaaccgcacagaactaaacagaagcattctcagaaccttcttcgtgatgtttgcattcaacccacagtgttgaacctttctttgatagttcaggtttgaaacactctttctgtagaaactgcaagtggataactgcacttctttgaggcctatcgtagtaaaggaaataacttcctataaaaacaagacagaagctttctcagaaaattctctgggatgattgacttgaactcacagagcagtactttccttgggatggagcagtttcgaaacacactttctgtagaatctgcaagtggatatttggacctgtctgaggaattcgttgcaaccggcataatttcagctaagtaaacagaagcagtctcagaatcttcttctgatgtttgcattcaaatcccagaattgaaacttcctttgaaagttcaggttggaaacactctttttgcaggatctacaagtggatattcggaccactctgtggacttcgttcgaaacgggtatatcttcacataacatctagacagaagcattctcagaaacttttctgtgatgactgcattcaactcacagagttgaacactccttttgagagcgcagtttggaaactctctttctctggaatctgcaaggagacatgcagatcctctttgaaggtttcgttggaaacggaatcatcttcacataaaaattacacagaagcatcctcaggaactccttggtgatgtttgtattcaacttccagagttgaactttccttcggaaagagcagctatgaaacactctttttctagaatctgcaagtggacattgggagggctgtgaggtttgtggtggaaaaggaaatatctccacataaatactagatagaagccttctcagaaactactttgtgatgattgcattcacctcacggagtggagcattcctattgacagagcagtttggaaacactcttctcgtagaatcggctagtggagatttggagcgctttgaggcctatggtagtaaagggaagagcttcacatacaatctagacagaagcattctcagaaaatactttgtgatgattgagtttaacacacagagctgaacattcctttggatggagaaggtttgaaacacactttctgtagaatctgcgagtggatatttggacctctctgaggatttcgttggaaacgggataactgcacctaactaaacggaagcattctcacaaaattctttgtgatgtttgcattcaaatcccagagttgatccttcctttgatagttcagctttgaaacactctttttgtaggatctgcaagtggatatttggaccactctttggccttcgttcgaaacgggtacatattcaaataaaatctagacagaagccttctcagaaccttctctgtgacgattgcattcaactcaaagcgttggagcctcctatggatagagcagttttgaatctctctttttgtggaatctgcaagtggatgtgtggtcctctttgaagatgtctttggaaaggggaatatcttcacataaaaactaaacagaagcattctcagaaacttctctgtgatgtttgtgttcaactcacagagtttcacattgcttttcatagagcagatgagaaacatgcttttcgtagggtctgcaagtggacatttggagagctttcaggcctgtggtggaaaacgaattatcgtcacgtaaaaactagagggaagcattgtcagaaacttctttgtgatgactgcattcaactcacagagttgaaggttccttttcaaacagcagtttccaaacactctttctgtggcatctgcaattggatgtttgggcctctttgaagatttcgttggaaacgggataatcttcacagaaaagctaaacagaagcatgctcagaaacttctttgtgatgtttgctttcaactcacagagttgaactttccttttgagagagaagctttgaaacactctttttctagaatctgcaagtggatatttggagggctttgaggcctgaggtggaacaggaattatcttcccgtaagaactagatagatgcattctcagaaactactttgtgacgattgcattcaagtcacagaggtgaacattccctttcagagagcactttggaaactctcgttgtgtagaatctgcaagtggagatatggaccgctttgaggcctatggtagtaaaggaaacagcttcatataaaaactagacagcagcattctcagaaaactctttgtgacgactgagtttaactcacagggctgaacattcctttggatggagcagtttggaaacacactatctgtaggatctgcaagcggatacttgggtctccctgaggatttcgttggaaacgggataaaccgcacagaactaaacagaagcattctcagaacttcttcgtgatgtttgcattcaacccacagtgttgaacctttctttgatagttcaggtttgaaacactctttttgtagaaactgcaagtggataactgcacttctttgaggcctatcgtagtaaaggaaataacttcctataaaaacaagacagaagctttctcagaaaattctctgggatgattgagttgaactcacagagcagtactttccttgggatggagtagtatcgaaacacactttctgtagaatctgcaagtggatatttggacctgtctgaggaattcgttgcaaacgggataatttcagctaagtaaacagaagcagtctcagaatcttcttgtgatgtttgcattcaaatcccagaattgaaccttcctttgaaagttcaggttggaaacactctttttgcaggatctacaagtggatattcggaccactctgtggacttcgttcgaaacgggtatatcttcacataacatctagacagaagcattctcagaaacttttctgtgatgactgcataaaactcacagagttgaacactccttttgagagcgcagttttgaaactctctttctctggaatctgcaaggggacatgcagacctctttgaaggtttcgttggaaacagaatcatcttcacataaaaattacacagaagcatcctcaggaactccttggtgatgtttgtattcaacttccagagttgaacttttcttcggaaagagcagctatgaaacactctttttctagaatctgcaagtggacattgggagggctgtgaggtttgtggtggaaaaggaaatatctccacataaatactagatagaagccttctcagaaactcctttgtgatgattgcattcacctcacggagtggagcattcctattgacagagcagtttggaaacactcttgttgtagaatctcctagtggagatttggagcgctttggcctatggtagtaaagggaagagcttcacataaaatcttgaaagaagcattctcagaaaatactttgtgatgattgagtttaacacacagagctgaacattcctttggatggagaaggtttgaaacacactttctgtagaatctgcgagtggatatttggacctctctgaggatttcgttggaaacgggataactgcacctaactaaacggaagcattctcacaaaattctttgtgatgtttgcattcaaatcccagagttgaaccttcctttgatagttcagctttgaaacactctttttgtaggatctgcaagtggatatttggaccactctttggccttcgttcgaaacgggtacatcttcaaataaaatctagacagaagccttctcagaaacttctctgtgacgattgcattcaactcaaagcgttgaaccctcctatggatagagcagttttgaatctctctttttgtggaatctgcaagtggatatgtggtcctctttgaagatgtctttggaaacgggaatatcttcacattaaatctaaacagaagcattctcagaaacttctctgtgatgtttgtgttcaactcacagagtttcacgttgcttttcatagagcagatgagaaacatgcttttcgtagggtctgcaagtggacatttggagagctttcaggcctgtggtggaaaacgaattatcgtcacgtaaaaactagagagaagcattgtcagaaacttgtttgtgatgactgcattcaactcacagagttgaaggttccttttcaaacagcagtttccaaacactctttctgtggcatctgcaagtggatgtttgggcctctttgaagatttcgttggaaacgggataatcttcacagaaaagctaaacagaagcattctcagaaacttctttgtgatgtttgctttcaactcacagagttgaactttccttttgagagagaagctttgaaacactctttttctagaatctgcaagtggatatttggagggctttgaggcctgtggtggaaaaggaattatcttcccgttaaaactagatagatgcattctcagaaactactttgtgacgattgcattcaagtcacagacgtgaacattccctttcacagagcactttggaaactctcgttgtgtagaatctgcaagtggagatatggagccctttgaggcctatggtagtaaaggaaacagcttcgtataaaaactagacagcagcattctcagaaaactctttgtgatgactgagtttaactcacagggctgaacattcctttggatggagcagtttggaaacacactatctgtaggatctgcaagcggatacttgggcctctctgaggatttcgttggaaacgggataaaccgcacagaactaaacagaagcattatcagaaccttcttcgtgatgtttgcattcaacccacagtgttgaacctttctttgatagttcaggtttgaaacactctttttgtagaaactgcaagtggataactgcacttctttgaggcctatcgtagtaaaggaaataacttcctataaaaacaagacagaagctttctcagaaaattctctgggatgattgagttgaactcacagagcagtactttccttgggatggagtagtttcgaaacacactttctgtagaatctgcaagtggatatttggacctgtctgaggaattcgttgcaaacgggataatttcagctaagtaaacagaagcagtctcagaatcttcttgtgatgtttgcattcaaatcccagaattgaaccttcctttgaaagttcaggttggaaacactctttttgcaggatctacaagtggatattcggaccactctgtggacttcgttcgaaacgggtatatcttcacataacatctagacagaagcattctcagaaacttttctgtgatgactgcattcaactcacacagttgaacactccttttgagagcgcagttttgaaactctctttctctggaatctgcaaggggacatgcagacctctttgaaggtttcgttggaaacggaatcatcttcacataaaaattacacagaagcattctcaggaactccttggtgatgtttgtattcaacttccagagttgaactttccttcggaaagagcagctatgaaacactctttttctagaatctgcaagtggacattgggagggctgtgaggtttgtggtggaaaaggaaatatctccacataaatactagatagaagccttctcagaaactactttgtgatgattgcattcacctcacggagtggagcattcctattgacagagcagtttggaaacactcttctcgtagaatcggctagtggagatttggagcgctttgaggcctatggtagtaaagggaagagcttcacataaaatctagacagaagcattctcagaaaatactttgtgatgattgagtttaacacacagagctgaacattcctttggatggagcaggtttgaaacacactttctgtagaatctgcgagtggatatttggacctctctgaggatttcgttggaaacgggataactgcacctaactaaacggaagcattctcacaaaattctttgtgatgtttgcattcaaatcccagagttgaaccttcctttgatagttcagctttgaaacactctttttgtaggatctgcagttggatatttggaccacactttggccttcattcgaaaagggtacatcttcaaataaaatctagacagaagccttctcagaaacttctctgtgatgattgcattcaactcaaagcgttgaaccctcctatggatagagcagttttgaatctctctttttgtggaatctgcaagtggatatgtggtcctctttgaagatgtctttggaaacgggaatatcttcacataaaaactaaacagaagcattctcagaaacttctctgtgatgtttgtgttcaactcacagagtttcacgttgcttttcatagagcagatgagaaacatgcttttcgtagggtctgcaagtggacatttggagagatttccggcctgtggtggaaaacgaattatcgtcacgtaaaaactagagagaagcattgtcagaaacttgtttgtgatgactgcattcaactcacagagttgaaggttccttttcatacagcagtttccaaacactctttctgtggcatctgcaagtggatgtttgggcctctttgaagatttcgttggaaacgggataatcttcacagaaaagctaaacagaagcattctcagaaacttctttgtgatgtttgctttcaactcacagagttgaactttccttttgagagagaagctttgaaacactctttttctagaatctgcaagtggatatttggagggctttgaggcctgtggtggaaaaggaattatcttcccgtaagaactagatagatgcattctcagaaactactttgtgacgattgcattcaagtcacagaggtgaacatttcctttcagagagcactttggaaactctcgttgtgtagaatctgcaagtggagatatggaccgctttgaggccgatggtagtaaaggaaacagcttcatataaaaactagacagcagcattctcagaaaactctttgtgacgactgagtttaactcacagggctgaacattcctttggatggagcagtttggaaacacactatctgtaggatctgcaagcggatacttgggcctctctgaggatttcgttggaaacgggataaaccacacagaactaaacagaagcattctcagaaccttcttcgtgatgtttgcattcaacccacagtgttgaacctttcttcgatagttcaggtttgaaacactctttttgtagaaactgcaagtggataactgcacttctttgaggcctatcgtagtaaaggaaataccttcctatgaaaacaagacagaagctttctcagaaaattctctgggatgattgagttgaactcacagagcagtactttccttgggatggagtagtttcgaaacacactttctgtagaatctgcaagtggatatttggacctgtctgaggaattcgttgcaaacgggataatttcagctaagtaaacagaagcagtctcagaatcttcttgtgatgtttgcattcaaatcccagaatggaaccttcctttgaaagttcaggttggaaacactctttttgcaggatctacaagtgtatattcggaccactctgtggacttcgttcgaaacgggtatatcttcacataacatctagacagaagcattctcagaaacttttctgtgatgactgcattcaactcacagagttgaacactccttttgagagcgcagttttgaaacgctctttctctggaatctgcaaggggacatgcagacctctttgaaggtttcgttggaaacggaatcatcttcacataaaaattacacagaagcatcctctggaactccttggtgatgtttgtattcaacttcctgagttgaactttccttcggaaagagcagctatgaaacactctttttctagaatctgccagtggacattaggagggctgtgaggtttgtggtggaaaaggaaatatctccacataaatactagatagaagccttctcagaaactactttgtgatgattgcattcacctcacagagttgagcattcctattgacagagcagtttggaaacactcttgttgtagaatctgctagtggagatttggagcgctttgaggcctatggtagtaaagggaagagcttcacataaaatctagacagaagcattctcagaaaatactttgagatgattgagtttaacacacagagctgaacattcctttggatggagcaggtttgaaacacactttctgtagaatctgcgagtggatatttggacctctctgaggatttcgttggaaacgggataactgcacctaactaaacggaagcattctcacaaaattcttcgtgatgtttgctttcaaatcccagagttgaaccttcctttgatagttcaggtttgaaacactctttttgtaggatctgcaagtggatatttggaccactctttggccttccttcgaaacgggtacatcttcaaataaaatctagacagaagccttctcagaaacttctctgtggtgattgcgttcaactcacagagttgaacgctcctatggataaagcagttttgaatctctctttttgtggaatctgcaagtggatatgtgaacctctttgaagatgtctttggaaacgggaatatcttcacataaaaactaaacagaagcattctcagaaacttctctgtgatgtttgtgttcaactcacagagtttcacgttgcttttcatagagcagatgagaaacatgcttttcgtagggtctgcaagtggacatttggagagctttcaggcctgtggtggaaaacgaattatcgtcacgtaaaaactagagagaagcattgtcagaaacttgtttgtgatgactgcattcaactcacagagttgaaggttccttttcaaacagcagtttccaaacactctttctgtggcatctgcaagtggatgtttgggcctctttgaagatttcgttggaaacgggataatcttcacagaaaagctaaacagaagcattcccagaaacttctttgtgatgtttgctttcaactcacagagttgaactttccttttgagagagaagctttgaaacactctttttctagaatctgcaagtggatatttgcagggctttgaggcctgtggtggaaaaggaattatcttcccgtaagaactagatagatgaattctcagaaactactttgtgacgattgcattcaagtcacggaggtgaacattccctttcagagagcactttggaaactctcgttgtgtagaatctgcaagtggaaatatggaccgctttgaggcctatggtagtaaaggaaacaacttcatataaaaactagacagcagcattctcagaaaactctttgtgatgactgagtttaactcacagggctgaacattcctttggatggagcagtttggaaacacactatctgtaggatctgcaagcggatacttgggcctctctgaggatttcgttggaaacgggataaaccgcacagaactaaacagaagcattctcagatccttcttcgtgatgtttgcattcaacccacagtgttgaacctttccttgatagttcaggtttgaaacactctttttgtagaaactgcaagtggataactgcacttctttgaggcctatcgtagtaaaagaaataacttcctataaaaacaagacagaagctttctcagaaaaatctctgggatgattgtgttgaactcacagagcagtactttccttgggatggagtagtttcgaaacacactttctgtagaatctgcaagtggatatttagacctgtctgaggaattcgttgcaaacgggataatttcagctaagtaaacagaagcagtctcagaattttcttgtgatgtttgcattcaaatcccagaattgaaccttcctttgaaagttcagtttggaaacactctttttgcaggatctacaagtggatattcggacctctctgtggacttcgttcgaaacgggtatatcttcacataccatctagacagaagcattctcagaaacttttctgtgatgactgcattcaactcacagagttgaacactccttttgagagcgcagttttgaaactctctttctctggaatctgcaaggggacatgcagacctctttgaaggtttcattggaaacggaatcatcttcacataaaaattacacagaagcattctcaggaactccttggtgatgtttgtattcaacttccagagttgaactttccttcagaaagagcagctatgaaacactctttttctagaatctgcaagtggacattgggagggctgtgaggtttgtggtggaaaaggaaatatctccacataaatactagatagaagccttctcagaaactactttgtgatgattgcattcacctcacggagtggagcattcctattgacagagcagtttggaaacactcttgttgtggaatgtgcaagtggagatttggagcgctttgaggcctatggtagtaaagggaatagcttcatagaaaaattagacagaagcattctcagaaaatactttgtgatgattgagtttaactcacagagctgaacattcctttggatggagcaggtttgagacacactttttgtagaatctacaagtggatatttggacctctctgaggatttcgttggaaacgcgataactgcacctaactacacggaagcattctcacaaaattctttgtgatgtttgcattcaaatcccagagttgaaccttcctttgatagttcagctttgaaacactctttttgtaggatctgcaagtggatacttggaccactctttggccttcgttcgaaacgggtacatcttcaaataaaatctagacagaagccttctcagaaacttctctgtgacgattgcattcaactcaaagcgttgaaccctcctatggatagagcagttttgaatctctctttttgtggaatctgcaagtggatatgtggtcctctttgaagatgtctttggaaacgggaatatcttcacataaaaactagacagaagcattctcagaaacttctctgtgatgtttgtgttcaactcacagagtttcacgttgcttttcatagagcagatgagaaacatgcttttcgtagggtgtgcaagtggacgtttggagagatttcaggcctgtggtggaaaacgaattatcgtcacgtaaaaactagagagaagcattgtcagaaacttgtttgtgatgactgcattcaactcacagagttgaaggttccttttcaaacagcagtttccaaacactctttctgtggcatctgcaagtggatgtttgggcctctttgaagatttcgttggaaacgggataatcttcacagaaaagctaaacagaagcattctcagaaacttctttgtgatgtttgctttcaactcacagagttgaactttccttttgagagagaagctttgaaacactctttttcttgaatctgcaagtggatatttggagcgctttgaggcctgtggtggaaaaggaattatcttcccacaagaactagatagatgcattctcagaaactactttgtgacgattgcattcaagtcacggaggtgaacattccctttcagagagcactttggaaactctcgttgtgtagaatctgcaagtggagatatggaccgctttgaggcctatggtagtaaaggaaacaacttcatataaaaactagacagcagcattctcagaaaactctttgtgacgactgagtttaactcacagggctgaacattcctttggatggagcagtttggaaacacactatctgtaggatctgcaagcggatacttgggcctccctgaggatttcgttggaaacgggataaaccgcacagaactaaacagaagcattctcagaaccttcttcgtgatgtttgcattcaacccacagtgttgaacctttctttgatagttcaggtttgaaacactctttttgtagaaactgcaagtggataactgcacttctttgaggcctatcgtagtaaaggaaataacttcctataaaaacaagacagaagctttctcagaaaattctctgggatgattgacttgaactcacagagcaatactttccttgggttggagtagtttcgaaacacactttctgtagaatctgcaagtggatatttggacctgtctgaggaatttgttgcaaacgggataatttcagctaagtaaacagaagcagtcccagaatcttcttgtgatgtttgcattcaaatcccagaattgaaccttcctttgaaagttcaggtttgaaacactctttttgcagggtctacaagtggatattcggaccactctgtggacttcgttcgaaacgggcatatcttcacataacatctagacagaagcattctcagaaacttttctgtgatgactgcattcaactcacagagttcaacactccttttgagagcgcagttttgaaactctctttctctggaatctgcaaggggacatgcagacctctttgaaggtttcgttggaaacggaatcatcttcacataaaaattacacagaagcatcttcaggaactccttggtgatgtttgtattcaacttccagagttgaactttccttcggaaagagcagctatgaaacactctttttctagaatctgcaagtggacattgggagggctgtgaggtttgtggtggaaaaggaaatatctccacataaatactagatagaagccttctcagaaactactttgtgatgattgcattcacctcacggagttgagcatccctattgacagagcagtttggaaacactcttcttgtagaatcggctagtggagatttggagcgttttgaggcctatggtagtaaagggaagagcttcacataaaatctagacagaagcattctcagaaaatactttgtgatgattgagtttaacacacagagctgaacattcctttggatggagaaggtttgaaacacactttctgtagaatctgcgagtggatatttggacctctctgaggatttcgttggaaacgggataactgcacctaactaaacggaagcattctcacaaaattctctttgatgtttgcattcaaatcccagagttgaaccttcctttgatagttcagctttgaaacactctttttgtaggttctgcaggtggatatttggaccactctttggccttcgttcgaaacgggtacatcttcaaataaaatctagacagaagccttctcagaaacttctccgtgatgattgcattcaactcaaagcgttgaaccctcctatggatagagcagttttgaatctctctttttgtggaatctgcaagtggatatgtggtcctctttgaagatgtctttggaaacgggaatatcttcacataaaaactaaacagaagcattctcagaaacttctctgtgatgtttgtgttcaactcacagagtttcacgttgcttttcatagagcagatgagaaacatgcttttcgtagggtctgcaagtggacgtttggagagatttcaggcctgtggtggaaaacgaattatcgtcacgtaaaaactagagagaagcattgtcagaaacttgtttgtgatgactgcattcaactcacagagttgaaggttccttttcaaacagcagtttccaaacactctttctgtggcatctgcaagtggatgattgggcctctttgaagatttcgttggaaacgggataatcttcacagaaaagctaaacagaagcattctcagaaacctctttttgatgtttgctttcaactcacagagttgaactttccttttgagagagaagctttgaaacactctttttctagaatctgcaagtggatatttggagggctttgaggcctgaggtggaaaaggaattatcttcccgtaagaactagatagaatgcattctcagaaacttctttgtgacgattgcattcaagtcacagaggtgaacattccctttcacagagcactttggaaactctcgttgtgtagaatcttcaagtggagatatggaccgctttgaggcctatggtagtaaaggaaacagcttcatataaaaactagacagcagcattctcagaaaactctttgtgacgactgagtttaactcacagggctgaacattcctttggatggagcagtttggaaacacactatctgtaggatcagcaagcggatactttggcctccctgaggatttcgttggaaacgggataaaccgcacagaactaaacagaagcattctcagaaccttcttcgtgatgtttgcattcaacccacagtgttgaacctttctttgatagttcaggtttgaaacactctttttgtagaaactgcaagtggataactgcacttctttgaggcctatcgtagtaaaggaaataacttcctataaaaacaagacagaagctttctcagaaaattctctgggatgattgagttgaactcacagagcagtactttccttgggatggagtagtttcgaaacacactttctgtaaaatctgcaagtggatatttggacctgtctgaggaattcgttgcaaacgggataatttcagctaagtaaacagaagcagtctcagaatcttcttgtgatggttgcattcaaatcccagaattgaaccttcctttgaaagttcaggttggaaacactctttttgcaggatctacaagtggatattcggaccactctgtggacttcgttcgaaacgggtatatcttcacataacatctagacagaagcattctcagaaacttttctgtgatgactgcattcaactcacagagttgaacactccttttgagagcgcagttttgaaactctctttctctggaatctgcaaggggacatgcagacctctttgaaggtttcgttggaaacggaatcatcttcacataaaaattacacagaagcattctcaggaactccctggtgatgtttgtattcaacttccagagttgaactttccttcggaaagagcagctatgaaacactccatttctagaatctgcaagtggacattgggagggctgtgaggtttgtggtggaaaaggaaatatctccacgtaaatactagatagaagccttctcagaaactactttgtgatgactgcattcacctcacggagtggagcattcctattgacagagcagtttggaaacactcttcttgtagaatcggctagtggagatttggagcgctttgaggcctatggtagtaaagggaagagcttcacataaaatctagacagaagcattctcagaaaatactttgtgatgattgagtttagcacacagagctgaacattcctttggatggagcaggtttgaaacacactttctgtagaacctgcgagtggatatttggacctctctgaggatttcgttggaaacgggataactgcacctaactaaacggaagcattctcacaaaattcttcgtgatgtttgctttcaaatcccagagttgaaccttcctttgatagttcaggtttgaaacactctttttgtaggatctgcaagtggatatttggaccactctttggccttccttcgaaacgggtacatcttcaaataaaatctagacagaagccttctcagaaacttctctgtgacgattgcattcaactcaaagcgttgaacgctcctatggatagagcagttttgaatctctctttttgtggaatctgcaagtggatatgtggtcctctttgaagatgtctttggaaacgggaatatcttcacataaaaactaaacagaagcattctcagaaacttctctgtgatgtttgtgttcaactcacagagtttcacgttgcttttcatagagtagatgagaaacatgcttttcgtagggtctgcaagtggacatttggagagatttcaggcctgtggtggaaaacgaattatcgtcacgtaaaaactagagagaagcattgtcagaaacttgtttgtgatgactgcattcaactcacagagttgaaggttccttttcaaacagcagtttccaaacactctttctgtggcatctgcaagtggatgtttgggcctctttgaagatttcgttggaaacgggataatcttcacagaaaagctaaacagaagcattctcagaaacttctttgtgatgtttgctttcaactcacagcagttgaactttccttttgagagagaagctttgaaacactctttttctagaatctgcaagtggatatttggagggctttgaggcctgtggtggaaaaggaattatcttcccgtaagaactagatagatgcattctcagaaactactttgtgacgattgcattcaagtcacagaggtgaacattccctttcagagagcactttggaaactctcgttgtgtagaatctgcaagtggagatatggaccgctttgaggcctatggtagtaaaggaaacagcttcatataaaaactagacagcaagcattctcagaaaactctttgtgacgactgagtttaactcatagggctgaacattcctttggatggagcagtttggaaacacactatctgtaggatctgcaagcggatacttgggcctctctgaggatttcgttagaaacgggataaaccgcacagaactaaacagaagcattctcagaaccttcttcgtgatgtttgcattcaacccacagtgttgaacctttctttgatagttcaggtttgaaacactctttttgtagaaactgcaagtggataactgcacttctttgaggcctatcgtaataaaggaaataacttcctataaaaacaagacagaagctttctcagaaaattctctgggatgattgagttgaactcacagagcagtactttccttgggatggagtagtttcgaaacacactttctgtagaatctgcaagtggatatttggacctgtctgaggaattcgttgcaaacgggataatttcagctaagtaaacagaagcaatctcagaatcttctttgtgatgtttgcattcgaatcccagaattgaaccttcctttgaaagttcaggtttgaaactctctttttgcagtatctacaagtggatatttggaccactctgtggccttcgttcgaaacgggtatatcttcacataacatctagacagaagcattctcagaaacttttctgtgatgactgcattcaactcacagagttgaacactccttttgagagcgcagttttgaaactctctttctctggaatctgcaaggggacatgcagacctctttgaaggtttcgttggaaacgggaatcatcttcacataaaaattacacagaagcattctcaggaactccttggtgatgtttgtattcaaattccagagttgaactttccttcggaaagagcagctatgaaacactctttttctagaatctgcaagtggacattgggagggctgtgaggtttgtggtggaaaaggaaatatctccacataaatactagatagaagccttctcagaaactactttgtgatgattgcattcacctcacggagtggagcattcctattgacagagcagtttggaaacactcttgttgtagaatctgctagtggagatttggagcgctttgaggcctatggtagtaaagggaagagcttcacataaaatctagacagaagcattctcagaaaatactttgtgatgattgagtttaacacacagagctgaacattcctttggatggacaaggtttgaaacacactttctgtagaatctgcgagtggatatttggaactctctgaggatttcgttggaaacgggataactgcacctaactaaacggaagcattctcacaaaattctttgtgatgtttgcattcaaatcccagagttgaaccttcctttgatagttcagctttgaaacactctttttctaggatctgcaggtggatatttggaccactcttttgccttcgttcgaaaaaggtacatcttcaaataaaatctagacagaaagccttctcagtaaacttctctgtgacgattgcattcaacccaaagagttgaaccctcctatggatagagcagttttgaatctctctttttgtggaatctgcaagtggatatgtggtcctctttgaagatgtctttggaaacgggaatatcttcacataaaaactaaacagaagcattctcagaaacttctctgtgatgtttgtgttcaactcacagagtttcacgttgcttttcatagagcagatgagaaacatgcttttcgtagggtctgcaagtggacatttggagagatttccggcctgtggtggaaaacgaattatcgtcacgtaaaaactagagagaagcattgtcagaaacttgtttgtgatgactgcattcaactcacagagttgaaggttccttttcaaacagcagtttccaaacactctttctgtggcatctgcaagtggatgtttgggcctctttgaagatttcgttggaaacgggataatcttcacagaaaagctaaacagaagcattctcagaaacttctttgtgatgtttgcttacaactcacagagttgaactttccttttgagagagaagctttgaaacactctttttctagaatctgcaagtggatatttggagggctttgaggcctgtggtggaaaaggaattatcttcccgtaagaactagatagatgcattctcagaaactactttgtgacgattgcattcaagtcacagaggtgaacattccctttcagagagcactttggaaactctcgttgtgtagaatctgcaagtggagatatggactgctttgaggcctatggtagtaaaggaaacagcttcatataaaaactagacagcagcattctcagaaaactctttgtgacgactgagtttaactcacagggctgaacattcctttggatggagcagtttggaaacacactatctgtaggatctgcaagcggatacttgggcctccctgaggatttcgttggaaacgggataaaccgcacagaactaaacagaagcattctcagaaccttcttcgtgatgtttgcattcaacccacagtgttgaacctttctttgatagttcaggtttgaaacactctttttgtagaaactgcaattggataactgcacttctttgaggcctatcgtggtaaaggaaataacttcctataaaaacaagacagaagctttctcagaaaattctctgggatgattgagttgaactcacagagcagtactttccttgggatggagtagtttcgaaacacactttctgtagaatctgcaagtggatatttggacctgtctgaggaattcgttgcaaacgggataatttcagctaagtaaacagaagcagtctcagaatcttcttgtgatgtttgcattcaaatcccagaattgaaccttcctttgaaagttcaggttggaaacactctttttgcaggatctacaagtggatattcggaccactctgtggacttcgttcgaaacgggtatatcttcacataacatctagacagaagcattctcagaaacttttctgtgatgactgcattcaactcacagagttgaacactccttttgagagcgcagttttgaaactctctttctctggaatctgcaaggggacatgcagacctcttttaaggtttcgttggaaacggaatcatcttcacataaaaattacacagaagcatcctcaggaactccttggtgatgtttgtattcaacttccagagttgaactttccttcggaaagagcagctatgaaacactctttttctagaatctgcaagtggacattgggagggctgtgaggtttgtggtggaaaaggaaatatctccacataaatactagatagaagccttctcagaaactactttgtgatgactgcattcacctcacggagtggagcattcctattgacagagcagtttggaaacactcttcttgtagaatcggctagtggagagttggagcgctttgaggcctatggtagtaaagggaagagcttcacataaaatctagacagaagcattctcagaaaatactttgtgatgattgagtttaacacacagagctgaacattcctttggatggagaaggtttgaaacacactttctgtagaatctgcgagtggatatttggacctctctgaggatttcgttggaaacgggataactgcacctaactaaacggaagcattctcacaaaattctttgtgatgtttgcattcaaatcccagagttgaaacttcctttcatagttcagctttggaacactctttttgtagcatctgcaggtggatatttggaccactctttggccttcgttcaaaacgggtacatcttcaaataaaatctagacagaagccttctcagaaacttctctgtgacgattgcattcaactcaaagcgttgaaacctcctatggatagagtcgttttgaatctctgtttttgtggaatctgcaagtggatatgtggtcctctttgaagatgtctttggaaacgggaatatcttcacataaaaactaaacagaagcattctcagaaacttctctgtgatgtttgtgttcaactcacagagtttcacgttgcttttcatagagcagatgagaaacatgcttttcgtagggtctgcaagtggacatttggagagctttcaggcctgtggtcgaaaacgaattatcgtcacgtaaaaactagagagaagcattgtcagaaacttgtttgtgatgactgcattcaactcacagagttgaaggttccttttcaaacagcagtttccaaacactctttctgaggcatctgcaagtggatgtttgggcctctttgaagatttcgttggaaacgggataatcttcacagaaaagctaaacagaagcatgctcagaaacttctttgtgatgtttgctttcaactcacagagttgaactttccttttgagagagaagctttgaaacactctttttctagaatctgcaagtggatatttggagagctttgaggcctgaggtggaacaggaattatcttcccgtaagaactagatagatgcattctcagaaactactttgtgacgattgcattcaagtcacagaggtgaacattccctttcagagagcactttggaaactctcgttgtgtagaatctgcaagtggagatatggaccgctttgaggcctatggtagtaaaggaaacagcttcatataaaaactagacagcagcattctcagaaaaccctttgtgacgactgagtttaactcacagggctgaacattcctttggatggagcagtttggaaacacactatctgtaggatctgcaagcggatacttgggcctccctgaggatttcgttggaaacgggatacaccgcacagaactaaacagaagcattctcagaacctccttcgtgacgtttgcattcaacccacagtgttgaacctttctttgatagttcaggtttgaaacactctttttgtagaaactgcaagtggataactgcacttctttgaggcctatcgtagtaaaggaaataacttcctataaaaacaagacagaagctttctcagaaaattctctgggatgattgagttgaactcacagagcagtactttccttgggatggagtagtttcgaaacacactttctgtagaatctgcaagtggatatttggacctgtctgaggaattcgttgcaaacgggataatttcagctaagtaaacagaagcaatctccgaatcttctttgtgatgtttgcattcgaatcccagaattgaaccttcctttgaaagttcaggtttgaaactctctttttgcagtatctacaagtggatatttggaccactctgtggccttcgttcgaaacgggtatatcttcacataacatctagacagaagcattctcagaaacttttctgtgatgactgcattcaactcacagagttgaacactccttttgagagcgcagttttgaaactctctttctctggaatctgcaaggggacatgcagacctctttgaaggtttcattggaaacagaatcatcttcacataaaaattacacagaagcatcttcaggaactccttggtgatgtttgtattcaacttccagagttgaactttccttcggaaagagcagctatgaaacactctttttctagaatctgcaagtggacattgggagggctgtgaggtttgtggtggaaaaggaaatatctccacataaatactagatagaagccttctcagaaactactttgtgatgattgcattcacctcacggagtggagcattcctattgacagagcagttggaaacactcttgttgtagaatctgctagtggagatttggagcgctttgagacctatggtagtaaaaggaagagcttcacataaaatctagacagaagcattctcagaaaatactttgtgatgattgagtttaacacacagagctgaacattcctttggatggagaaggtttgaaacacactttctgtagaatctgcgagtggatatttggacctctctgaggatttcgttggaaacgggataactgcacctaactaaacggaagcattctcacaaaattctttgtgatgtttgcattcaaatcccagagttgaaccttcctttgatagttcagctttgaaacactctttttgtaggatctgctggtggatatttggaccactctttggccttcgttcgaaaagggtacatcttcaaataaaatctagacagaagccttctcagaaacttctctgggatgattgcagtcaactcaaagcgttgagccctcctatggatagagcagttttgaatctctctttttgtggaatctgcaagtggatatgtggtcctctttgaagatgtctttggaaacgggaatatcttcacataaaaactaaacagaagcattctcagaaacttctctgtgatgtttgtgttcaactcacagagtttcacgttgcttttcatagagcagatgagaaacatgcttttcgtagggtctgcaagtggacatttggagagctttcaggcctgtggtggaaaacgaattatcgtcacgtaaaaactagagagaagcattgtcagaaacttgtttgtgatgactgcattcaactcacagagttgaaggttccttttcaaacagcagtttccaaacactctttctgtggcatctgcaagtggatgtttgggcctctttgaagatttcgttggaaacgggataatcttcacagaaaagctaaacagaagcattctcagaaacttctttgtgatgtttgctttcaactcatagagttgaactttccttttgacagagaagctttgaaacactctttttctagaatctgcaagtggatatttggagggctttgaggcctgaggtggaaaaggaattatcttcctgtaagaactagatagatgcattctcagaaactactttgtgacgattgcattcaagtcacagaggtgaacattccctttcagagagcactttggaaactctcgttgtgtagaatctgcaagtggagatatggaccgctttgaggcctatggtagtaaaggaaacagcttcatataaaaactagacagcagcattctcagaaaactctttgtgacaactgagtttaactcacagggctgaacattcctttggatggagcagtttggaaacacactatctgtaggatctgcaagcggatacttgggcctctctgaggatttcgttggaaacgggataaaccgctcagaactaaacagaagcattctcagaaccttcttcgtgatgtttgcattcaacccacagtgttgaacctttctttgatagttcaggtttgaaacactctttttgtagaaactgcaagtggataactgcacttctttgaggcctatcgtagtaaaggaaataacttcctataaaaacaagacagaagctttctcagaaacttctctgggatgattgagttgaactcacagagcagtactttccttgggatggagtagtttcgaaacacactttctgtagagtctgcaagtggatatttggacctgtctgaggaattcgttgcaaacgggataatttcagctaagtaaacagaagcagtctcagaatcttcttgtgatggttgcattcaaatcccagaattgaaccttcctttgaaagttcaggttggaaacactctttttgcaggatctgcaagtggatattcggaccactctgtggacttcattcgaaacggatatatcttcacataacatctagacagaagcattctcagaaacttttctgtgatgactgcattcaactcacagagtggaacactccttttgagagcgcagttttgaaactctctttctctggaatctgcaaggggacatgcagacctctttgaaggtttcgttggaaacggaatcatcttcacataaaaattacacagaagcatcctcaggaactccttggtgatgtttgtattcaacttccagagttgaactttccttcggaaagagcagctatgaaacactctttttctagaatctgcaagtggacattgggaaggctgtgaggtttgtggtggaaaaggaaatatctccacataaatactagatagaagccttctcagaaactactttgtgatgattgcattcacctcacagagttgagcattcctattgacagagcagtttggaaacactcttgttgtagaatctgctagtggagatttggagcgctttgaggcctatggtagtaaagggaagagcttcacataaaatctagacagaagcattctcagaaaatactttgtgatgattgagtttaacacacagagctgaacattcctttggatggagaaggtttgaaacacactttctgtagaatctgcgagtggatatttggacctctctgaggatttcgttggaaacgggataactgcacctaactaaacggaagcattctcacaaaattcttcgtgatgtttgcattcaaatcccagagttgaaccttcctttgatagttcagctttgaaacactctttttgtaggatctgcaggtggatatttggaccactctttggccttcgttcgaaacgggtacatcttcaaataaaatctagacagaagccttctcagtaacttctctgtgacgattgcattcaactcaaagcgttgaaccctcctatggatagagcagttttgaatctctctttttgtggaatcttcaagtggatgtgtggtcctctttgaagatgtctttggaaacgggaatatcttcacagaaaaactaaacagaagcattctcagaaacttctctgtgatgtttgtgttcaactcacagagtttcacgttgcttttcatagagcagatgagaaacatgcttttcgtagggtctgcaagtggacatttggagagctttcaggcctgtggtggaaaacgaattatcgtcacgtaaaaactagagagaagcattgtcagaaacttgtttgtgatgactgcattcaactcacagagttgaaggttccttttcaaacagcagtttccaaacactctttctgtggcatctgcaagtggatgtttgggcctctttgaagatttcgttggaaacgggataatcttcacagaaaagctaaacagaagcattctcagaaacttctttgtgatgtttgctttcaactcacagagttgaactttccttttgagagagaagctttgaaacactctttttctagaatctgcaagtggatatttggagggctttgaggcctgaggtggaaaaggaattatcttcccgtaagaactagatagatgcattctcagaaactactttgtggcgattacattcaagtcacagaggtgaacattccctttcacagagcactttggaaactctcgttgtgtagaatctgcaagtttagatatggaccgctttgaggcctatggtagtaaaggaaacagcttcatataaaaactagacagcagcattctcagaaaactctttgtgacgactgagtttaactcacagggctgaacattcctttggatggagcagtttggaaacacactatctgtaggatctgcaagcggatacttgggcctctgtgaggatttcgttggaaacgggataaaccgcacagaactaaacagaagcattctcagaaccttcttcgtgatgtttgcattcaacccacagtgttgaacctttctttgatagttcaggtttgaaacactctttctgtagaaactgcaagtggataactgcacttctttgaggcctatcgtagtaaaggaaataacttcctataaaaacaagacagaagctttctcagaaaattctctgggatgattgagttgaactcacagagcagtactttccttgggatggagtagtttcgaaacacactttctgtagaatctgcaagtggatatttggacctgtctgaggaattcgttgcaaacgggataatttcagctaagtaaacagaagcagtctcagaatcttcttgtgatgtttccattcaaatcccagaattgaaccttcctttaaaagttcatgttggaaacactctttttgcaggatctacaagtggatattcggaccactctgtggacttcgttcgaaacgggtatatcttcacataacatctagacagaagcattctcagaaacttttctgtgatgactgcattcaactcacagagttgaacactccttttgagagcgcagttttgaaactctctttctctggaatctgcaaggggacatgcagacctctttgaaggtttcgttggaaacggaatcatcttcacataaaaattacacagaagcatcctcaggaactccttggtgatgtttgtattcaacttccagagttgaactttccttcggaaagagcagctatgaaacactctttttctagaatctgcaagtggacattgggagggctgtgaggtttgttgtggaaaaggaaatatctccacataaatactagatagaagacttctcagaaactactttgtgatgattgtattcacctcacggagtggagcattcctattgacagagcagtttggaaacactcttgttgtagaatctgctagtggagatttggagtgctttgaggcctatggtagtaaagggaagagcttcacataaaatctagacacaagcattctcagaaaattctttgtgatgattgtgtttaacacatagagctgaacattcctttggagggagaaggtttgaaacacactttctgtagaatctgcgagtggatatttggacctctctgaggatttcgttggaaacgggataactgcacctaactaaacggaagcattctcacaaaattctttgtgatgtttgcattcaaatcccagagttgaaccttcctttgatagttcagctttgaaacactctttttgtaggatctgcaagtggatatttggaccaccctttggccttcgttcgaaacgggtacatattcaaataaaatctagacagaagccttctcagaaacttctctgtgacgattgcattcaactcaaagcgttgaaccctcctatggatagagcagttttgaatctctctttttgtggaatctgcaagtggatatgtggtcctcattgaagatgtctttggaaacgggaatatcttcacataaaaactaaacagaagcattctcagaaacttctctgtgatgtttgtgttcaactcacagagtttcacgttgcttttcatagagcagatgagaaacatgcttttcgtagggtctgcaagtggacatttggagagatttccggcctgtggtggaaaacgaattatcgtcacgtaaaaactagagagaagcattgtcagaaacttgtttgtgatgactgcattcaactcacagagttgaaggttccttttcaaacagcagtttccaaacactctttctgtggcatctgcaagtggatgtttgggcctctttgaagatttcgttggaaacgggataatcttcacagaaaagctaaacagaagcattctcagaaacttctttgtgatgtttgctttcaactcacagagttgaactttccttttgagagagaagctttgaaacactctttttctagaatctgcaagtggatatttggaggcctttgaggcctgaggtggaaaaggaattatattcccgtaagaactagatagatgcattctcagaaagtactttgtgacgattgcattcaagtcacagaggtgaacattccctttcagagagcactttggaaactctcgttgtgtagaatctgcaagtggagatatggaccgctttgaggcctatggtagtaaaggaaacagcttcatgtaaaaactagacagcagcattctcagaaaactctttgtgacgactgagtttaactcacagggctgaacattcctttggatggagcagtttggaaacacactatctgtaggatctgcaagcggatacttgggcctccctgaggatttcgtgggaaacgggataaaccgcacagaactaaacagaagcattctcagaaccttcttcgtgatgtttgcattcaacccacagtgttgaacctttctttgatagttcaggtttgaaacactctttttgtagaaactgcaagtggataactgcacttctttgaggcctatcgtagtaaaggaaataacttcctataaaaacaagacagaagctttctcagaaaaatctctgggatgattgtgttgaactcacagagcagtactttccttgggatggagtagtttcgaaacacactttctgtagaatctgcaagtggatatttggacctgtctgaggaattcgttgcaaacgggataatttcagctaagtaaacagaagcagtctcagaatcttcttgtgatgtttgcattcaaatcccagaattgaaccttcctttgaaagttcaggttggaaacactctttttgcaggatctacaagtggatattcggaccactctgtggacttcgttcgaaacggctatatcttcacataacatctagacagaagcattctcagaaacttttctgtgatgactgcattcaactcacagagttgaacactccttttgagagcgcagttttgaaactctctttctctggaatctgcaaggggacatgcagacctctttgaaggtttcgttggaaacggaatcatcttcacataaaaattacacagaagcctcctcaggaactccttggtgatgtttgtattcaacttccagagttgaactttccttcggaaagagcagctatgaaacactctttttctagaatctgcaagtggacattgggagggctgtgaggtttgtggtggaaaaggaaatatctccacataaatactagatagaagccttctcagaaactactttgtgatgactgcattcacctcacggagtggagcattcctattgacagagcagtttggaaacactcttcttgtagaatcggctagtggagagttggagcgctttgaggcctatggtagtaaagggaagagcttcacataaaatctagacagaagcattctcagaaaatactttgtgatgattgagtttaacacacagagctgaacattcctttggatggagaaggtttgaaacacactttctgtagaatctgcgagtggatatttggacctctctgaggatttcgttggaaacgggataactgcacctaactaaacggaagcattctcacaaaattctttgtgatgtttgcattcaaatcccagagttgaaccttcctttgatagttcagttttgaaacactctttttgtaggatctgcaggtggatatttggaccactctttggccttcgttcgaaaagggtacatcttcaaataaaatctagacagaagccttctcagaaacttctctgtgacgattgcattcaactcaaagcgttgaaccctcctatggatagagcagttttgaatctctctttttgtggaatctgcaagtggatatgtggtcctctttgaagatgtctttggaaacgggaatatcttcacataaaaactaaacagaagcattctcagaaacttctctgtgatgtttgtgttcaaatcacagagtttcacgttgcttttcatagagcagatgagaaacatgcttttcgtagggtctgcaagtggacatttggagagctttcaggcctgtggtggaaaacgaattatcgtcacgtaaaaactagagagaagcattgtcagaaacttgtttgtgatgactgcattcaactcacagagttgaaggttccttttcaaacagcagtttccaaacactctttctgtggcatctgcaagtggatgtttgggcctctttgaagatttcgttggaaacgggataatcttcacagaaaagctaaacagaagcattctcagaaacttctttgtgatgtttgctttcaactcacagagttgaactttccttttgagagagaagctttgaaacactctttttctagaatctgcaagtggacattgggagggctgtgaggtttgtggtggaaaaggaaatatctccacataaatactagatagaagccttctcagaaactactttgtgatgattgcattcacctcacggagtggagcattcctattgacagagcagtttggaaacactcttgttgtagaatctgctagtggagatttggagcgctttgaggcctatggtagtaaagggaagagcttcacataaaatctagacagaagcattctcagaaaatactttgtgatgattgagtttaacacacagagctgaacattcctttggatggagaaggtttgaaacacactttctatagaatctgcgagtggatatttggacctctctgaggatttcgttggaaacgggataactgcacctaactaaacggaagcattctcacaaaattctttgtgatgtttgcattcaaatcccagagttgacccttcctttgatagttcagctttgaaacactctttttgtaggatctgctggtggatatttggaccactctttggccttcgttcgaaacgggtacatcttcaaataaaatctagacagaagccttctcagaaacttctctgtgacgattgcattcaactcaaagcgttgaaccctcctatggatagagctgttttgaatctctctttttgtggaatctgcaagtggatatgtggtcctctttgaagatgtctttggaaacgggaatatcttcacataaaaactaaacagaagcattctcagaaacttctctgtgatgtttgtgttcaactcacagagtttcacgttgcttttcatagagcagatgagaaacatgcttttcgtagggtctgcaagtggacatttggagagatttcaggcctgtggtggaaaacgaattatcgtcacgtaaaaactagagagaagcattgtcagaaacttgtttgtgatgattgcattcaactcacagagttgaaggttccttttcaaacagcagtttccaaacactctttctgtggcatctgcaagtggatgtttgggcctctttgaagatttcgttggaaacgggataatcttcacagaaaagctaaacagaagcattctcagaaacttctttgtgatgtttgctttcaactcacagagttgaactttccttttgagagagaagctttgaaacactctttttctagaatctgcaagtggatatttggagggctttgaggcctgtggtggaaaaggaattatcttcccgttaaaactagatagatgcattctcagaaactactttgtgtcgattgcattcaagtcacagaggtgaacattccctttcagagagcactttggaaaccctcgttgtgtagaatctgcaagtggagatatggaccgctttgaggcctatggtagtaaaggaaacagcttcatataaaaactagacagcagcattctcagaaaactctttgtgacgactgagtttaactcacagggctgaacattcctttggatggagcagtttggaaacacactatctgtaggatctgcaagcggatacttgggcctctctgaggattgcgttggaaacgggataaaccgcacagaacgaaacagaagcattctcagaaccttcttcgtgatgtttgcattcaacccacagtgttgaacctttctttgatagttcaggtttgaaacactctttttgtagaaactgcaagtggataactgcacttctttgaggcctatcgtagtaaaggaaataacttcctataaaaacaagacagaagctttctcagaaaattctctgcgatgattgagttgaactcacagagcagtactttccttgggatggaatagtatcgaaacacactttctgtagaatctgcaagtggatatttggacctgtctgaggaattcgttgcaaacgggataatttcagataagtaaacagaagcagtctcagaatcttcttgtgatgtttgcattcaaatcccagaactgaaccttcctttgaaagttcaggttggaaacactctttttgcaggatctacaagtggatattcggaccactctgtggacttcgttcgaaacgggtatatcttcacataacatctagacagaagcattctcagaaacttttctgtgatgactgcattcaactcacagagttgaacactccttttgagagcgcagatttgaaactctctttctctggaatctgcaaggggacatgcagacctctttgaagttttcgttggaaacggaatcatcttcacataaaaattacacagaagcattctcaggaactccttggtgatgtttgtattcaacttccagagttgaagtttccttcggaaagagcagctatgaaacactctttttctagaatctgcaagtggacattgggagggctgtgaggtttgtggtggaaaaggaaatatctccacgtaaatactagatagaagccttctcagaaactactttgtgatgatcgcattcacctcacggagtggagcattcctattgacagagcagtttggaaacactcttgttgtagaatctgctagtggagatttggagcgctttgaggcctatggtagtaaagggaagagcttcacataaaatctagacagaagcattctcagaaaatactttgtgatgattgagtttaacacacagagctgcacattcctttggatggagaaggtttgaaacacactttctgtagaatctgcgagtggatatttggaactctctgaggatttcgttggaaacgggataactgcacctaaataaacggaagcattctcacaaaattctttgtgatgtttgcattcaaatcccagagttgacccttcctttgatagttcagctttgaaacactctttttggaggatctgaaagtggatatttggaccactctttggccttcgttcgaaacgggtacatcttcaaataaaatctagacagaagccttctcagaaacttctctgtgacgattgcattcaactcagagagttgaaccctcctatggatggagcagttttgaatctctctttttgtggaatctgcaagtggatatgtggtcctctttgaagatgtctttggaaacgggaatatcttcacataaaaactaaacagaagcattctcagaaacttctctgtgatgtttgtgttcaactcacagagtttcacgttgcttttcatagagcagatgagaaacatgcttttcgtagggtctgcaagtggacatttggagagctttcaggcctgtggtggaaaacgaattatcgtcacgtaaaaactagagagaagcattgtcagaaacttgtttgtgatgactgcattcaactcacagagttgaaggttccttttcaaacagaagtttccaaacactctttctgtggcatctgcaagtggatgtttgggcctctttgaagatttcgttggaaacgggataatcttcacagaaaagctaaacagaagcattctcagaaacttctttgtgatgtttgctttcaactcacagagttgaactttccttttgagagagaagctttgaaacactctttttctagaatctgcaagtggacattgggagggctgtgaggtttgtggtggaaaaggaaatatctccacataaatactagatagatgcattctcagaaactactttgtgacgattgcattcaagtcacagaggtgaacattccctttcagagagcactttggaaactctcgttgtgtagaatctgcaagtggagatatggaccgctttgaggcctatggtagtaaaggaaacagcttcatataaaaactagacagcagcattctcagaaaactctttgtgacgactgagtttaactcacagggctgaacattcctttggatggagcagtttggaaacacactatctgtaggatctgcaagcggatacttgggcctccctgaggatttcgtgggaaacgggataaaccgcacagaactaaacagaagcattctcagaaccttcttcgtgatgtttgcattcaacccacagtgttgaacctttctttgatagttcaggtttgaaacactctttttgtagaaactgcaagtggataactgcacttctttgaggcctatcgtagtaaaggaaataacttcctataaaaacaagacagaagctttctcagaaaattctctgggatgattgagttgaactcacagagcagtactttctttgggatggagtagtttcgaaacacactttctgtacaatctgcaagtggatatttggacctgtctgaggaattcgttgcaaacgggataatttcagctaagtaaacagaagcagtctcagaatcttcttgtgatgtttgcattcaaatcccagaattgaaccttcctttgaaagttcaggttggaaacactctttttgcaggatctacaagtgtatattcggaccactctgtggacttcgttcgaaacgggtatatcttcacataacatctagacagaagcattctcagaaacttttctgtgatgactgcattcaactcacagagttgaacactccttttgagagcgcagttttgaaactctctatctctggaatctgcaaggggacatgcagacctctttgaagatttcgttggaaacggaatcatcttcacataaaaattacacagaagcatcctcaggaactccttggtgatgtttgtattcaacttccagagttgaactttccttcggaaagagcagctatgaaacactctttttctagaatctgcaagtggacattgggagggctgtgaggtttgtggtggaaaaggaaatatctccacataaatactagatagaagccttctcagaaactactttgtgatgattgcattcacctcacggagtggagcattcctattgacagagcagtttggaaacactcttcttgtagaatcggctagtggagatttggagcgctttgaggcctatggtggtaaagggaagagcttcacataaaatctagacagaagcattctcagaaaatactttgtgatgattgagtttaacacacagagctgaacattcctttggatggagaaggtttgaaacacactttctgtagaatctgcgagtggatatttggacctctcggaggatttcgttggaaacgggataactgcacctaactaaacggaagcattctcacaaaaatctttgtgatgtttgcattcaaatcccagagttgaaccttcctttgatagttcagctttgaaacactctttttgtaggatctgcaggtggatatttggaccactctttggccttcgttcgaatagggtacatcttcaaataaaatctagacagaagccttctcagaaacttctctgtgacgattgcattcaactcaaagagttgaaccctcctatggatagagcagttttgaatctctctttttgtggaatctgcaagtggatatgtggtcctctttgaagatgtctttggaaacgggaatatcttcacataaaaactaaacagaagcattctcagaaacttctctgtgatgtttgtgttcaactcacagagtttcacgttgctattcatagagcagatgagaaacttgcttttcgtagggtctgcaagtggacatttggagagatttccggcctgtggtggaaaacgaattatcgtcacgtaaaaactagagagaagccttgtcagaaacttgtttgtgatgactgcattcaactcacagagttgaaggttcctttccaaacagcagtttccaaacactctttctgtggcatctgcaagtggatgtttgggcctctttgaagatttcgttggaaacgggataatcttcacagaaaagctaaacagaagcattctcagaaacttctttgtgatgtttgatttcaactcacagagttgaactttccttttgagagagaagctttgaaacactctttttctagaatctgcaagtggatatttggagggctttgaggcctgaggtggaaaaggaattatcttcccgtaagaactagatagatgcattctcagaaactactttgtgacgatttcattcaagtcacagaggtgaacattccctttcacagagcactttggaaactctcgttgtgtagaatctgcaagtggagatatggaacgctttgaggcctatggtagtaaaggaaacagcttcatataaattagacagcagcattctcagaaaactctttgtgacgactgagtttaactcacagggctgaacattcctttggatggagcagtttggaaacacactatctgtaggatctgcaagcggatacttgggcctccctgaggatttcgttggaaacgggatacaccgcacagaactaaacagaagcattctcagaaccttcttcgtgatgtttgcattcaacccacagtgttgaacctttctttgatagttcaggtttgaaacactctttttgtagaaactgcaagtggataactgcacttctttgaggcctatcgtagtaaaggaaataacttcctataaaaacaagacagaagctttctcagaaaattctctgggatgattgagttgaacacacagagcagtactttccttggaatggagtagtttcgaaacacactttctgtagaatctgcaagtggatatttggacctgtctgaggaattcgttgcaaacgggataatttcagctaagtaaacagaagcagtctcagaatcttcttgtgatgtttgcattcaaatcccagaactgaaccttcctttgaaagttcaggttggaaacactctttttgcaggatctacaagtggatattcggaccactctgtggacttcgttcgaaacgggtatatcttcacataacatctagacagaagcattctcagaaacttttctgtgatgactgcattcaactcacagagttcaacactccttttgagagcgcagtttggaaactctctttctctggaatctgcaaggggacatgcagacctctttgaaggtttcattggaaacggaatcatcttcacataaaaattacacagaagcatcctcaggaactccttggtgatgtttgtattcaacttccagagttgaactttccttcggaaagagcagctatgaaacactctttttctagaatctgcaagtggacatttggagggctgtgaggtttgtggtggaaaaggaaatatctccacataaatactagatagaagccttctcagaaactcctttgtgatgattgcattcacctcacggagtggagcactcctattgacagagcagtttggaaacactcttgttgtagaatctcctagtggagatttggagcgctttgaggcctatggtagtaaagggaagagcttcacataaaatctagacagaagcattctcagaaaatactttgtgatgattgagtttaacacacagagctgaacattcctttggatggagaaggtttgaaacacactttctgtagaatctgcgagtggatatttggacctctctgaggatttcgttggaaacgtgataactgcacctaactaaacggaagcattctcacaaaattctttgtgatgtttgcattcaaatcccagagttgaaccttcctttgatagttcagctttgaaacactctttttgtaggatctgctggtggatatttggaccactctttggccttcgttcgaaacgggtacatcttcaaataaaatctagacagaagccttctcagaaacttctctgtgacgattgcattcaactcacagcgttgaaccctcctaaggatagagcagttttgaatctctctttttgtggaatctgcaagtggatatgtggtcctctttgaagatgtctttggaaacgggaatatcttcacataaaaactaaacagaagcattctcagaaacttctctgtgatgtttgcgttcaactcacagagtttcacattgcttttcatagagcagttctgaaacatgcttttcggaatatctgcaagtggacatttggagagctttcaggcctgtggtggaaaacgaattatcgtcacataaaaactagagagaagcattctcagaaacttttctgtgatgactgcactcaactcacagagttgaacactccttttgagagcgcagttttgaaactctctttctctggaatctgcaaggggacatgcagacctctttgaaggtttcgttggaaacggaatcatcttcacataaaaattacacagaagcatgctcaggatctccttggtgatgtttgtattcaacttccagagttgaactttctttcggaaaaaacagctatgaaacactctttttctagaatctgcaagtggatatttggagggctttgaggtttgtggtggaaaaagaaatatcttcacataaatagtagatagaagcattctcagaaactactttgtgatgattgcattcacctcacagagttgaacattccctttgacagagcactttggaaactctcgttgtgtagcgtctgcaagttgagatatggaccgctttgaggcctatggtagtaaaggaaatagcttcatataaaaactagacagtagcattctcagaaaactctttgtgacgactgagtttaactcacagggctgaacattcctttggatggagcagtttggaaacacactatctgtaggatctgcaagcggatacttgggcctctctgaggattgcgttggaaacgggataaaccgcacagaactaaacagaagcattctcagaaccttcttcgtgatgtttgcattcaacccacagtgttgaacctttctttgatagttcaggtttgaaacactctttttgtagaaactgcaagtggataactgcacttctttgaggcctatcgtagtaaaggaaataacttcctataaaaacaagacagaagctttctcagaaaattctctgggatgattgagttgaactcacagagcagtactttccttgggatggagtagtttcgaaacacactttctgtagaatctgcaagtggatatttggacctgtctgaggaattcgttgcaaacgggataatttcagctaagtaaacagaagcagtctcagaatcttcttgtgatgtttgcattcaaatcccagaatgaaaccttcctttgaaagttcaggttggaaacactctttttgcaggatctacaaggggatattcggaccactctgtggacttcgttcgaaacgggtatatcttcacataacatctagacagaagcattctcagaaacttttctgtgatgactgcattcaactcacagagttgaacactccttttgagagcgcagttttgaaactctctttctctggaatctgcaaggggacatgcagacctctttgaaggtttcgttggaaacggaatcatcttcacataaaaattacacagaagcatcctcaggaactccttggtgatgtttgtattcaacttccagagttgaactttccttcggaaagagcagctatgaaacactctttttctagaatctgcaagtggaccttgggagggctgtgaggtttgtggtggaaaaggaaaaatctccacataaatactagatagaagccttctcagaaactcctttgtgatgattgcattcacctcacggagtggagcattcctattgacagagcagtttggaaacactcttgttgtagaatcggctagtggagatttggagcgctttgaggcctatggtagtaaagggaagagcttcacataaaatctagacagaagcattctcagaaaatactttgtgatgattgagtttaacacacagagctgaacattcctttggatggagaaggtttgaaacacactttctgtagaatctgcgagtggatatttggacctctctgaggatttcgttggaaacgggataactgcacctaactaaacggaagcattctcacaaaattctttgtgatgtttgcattcaaatcccagagttgaaccttcctttgatagttcagctttgaaacactctttttgtaggatctgcaagtggatatttggaccactctttggccttcgttcgaaacgggtacatcttcaaataaaatctagacagaagccttctcagaaacttctctgtgacgattgcattcaacaaaaagagttgaaccgtaatacggatagagcagttttgaatctctctttttgtggaatctgcaagtggatatgtggtcctctttgaagatgtctttggaaacgggaatatcttcacataaaaactaaacagaagcattctcagaaacttctctgtgatgtttgtgttcaactcacagagtttcacgttgcttttcatagagcagatgagaaacatacttttcgtagggtctgcaagtggacatttggagagatttcaggcctgtggtggaaaacgaattatcgtcacgtaaaaactagagagaagcattgtcagaaacttgtttgtgatgactgcattcaacccacagagttgaaggttccttttcaaacagcagtttccaaacactctttctgtggcatctgcaagtggatgtttgggcctctttgaagatttcgttggaaacgggataatcttcacagaaaagctaaacagaagcatgctcagaaacttctttgtgatgtttgctttcaactcacagagttgaactttccttttgagagagaagctttgaaacactctttttctagaatctgcaagtggatatttggagggcattgaggcctgaggtggaacaggaattatcttcccgtaagaactagatagatgcattctcagaaacttctttgtgacgattgcattcaagtcacagaggtgaacattccctttcagagagcactttggaaactctcgctgtgtagaatctgcaagtggagatatggaccgctttgaggcctatggtagtaaaggaaacagcttcatataaaagctagacagcagcattctcagaaaactctttgtgacgactgagtttaactcacagggctgaacattcctttggatggagcagtttggaaacacactatctgtaggatctgcaagcggatacttgggcctccctgaggatttcgttggaaacgggataaaccgcacagaactaaacagaagcattctcagaaccttcttcgtgatgtttgcattcaacccacagtgttgaacctttctttgatagttcaggtttgaaacactctttttgtagaaactgcaagtggataactgcacttctttgaggcctatcttaataaaggaaataaattcctataaaaacaagacagaaagctttctcagaaaattctctgggatgattgagttgaactcacagagcagtactttccttgggatggagtagtttcgaaacacactttctgtagaatctgcaagtgggtatttggacctgtctgaggaattcgttgcaaacgggataatttcagctaagtaaacagaagcagtctcagcaatcttcttgtgatggttgcattcaaatcccagaatggaaccttcctttgaaagttcaggttggaaacactctttttgcaggatctacaagtggatattcggaccactctgtggacttcgctcgaaacgggtatatcttcacataacatctagacagaagcattctcagaaacttttctgtgatgactgcattcaactcacagagttgaacactccttttgagagcgcagttttgaaactctctttctctggaatctgcaaggggacatgcagacctctttgaaggtttcgttggaaacgggaatcatcttcacataaaaattacacagaagcatcctcaggaactccttggtgatgtttgcattcaacttccagagttgaactttccttcggaaagagcagctatgaaacactctttttctagaatctgcaagtggacattgggagggctgtgaggtttgtggtggaaaaggaaatatctccacataaatactagatagaagccttctcagaaactactttgtgatgattgcattcacctcacagagtggagcattcctattgacagagcagtttggaaacactcttgttgtagaatctgctagtggagatttggagcgctttgaggcctatggtagtaaagggaagagcttcacataaaatcaagacagaagcattctcagaaaatactttgtgatgattgagtttaacacacagagctgaacattcctttggatggagcaggtttgaaacacactttctatagaatctgcgagtggatatttggacctctctgaggatttcgttggaaacgggataactgcacctaactaaacggaagcattctcacaaaattctttgtgatgtttgcattcaaatcccagagttgaaccttcctttgatagttcagctttgaaacactctttttgtaggctctgcaggtggatatttggaccactctttggccttcgttcaaaacgggtacatcttcaaataaaatctagacagaagccttctcagaaacttctctgtgacgattgcattcaactccaagcgttgaaccctcctatggatagagcagttttgaatctctctttttgtggaatctgcaagtggatatgtggtcctctttgaagatgtctttggaaacgggaatatcttcacataaaaactaaacagaagcattctcagaaacttctctgtgatgtttgtgttcaactcacagagtttcacgttgcttttcatagagcagatgagaaacatgcttttcgtagggtctgcaagtggacatttggagagatttcaggcctgtggtggaaaacgaattatcgtcacgtaaaaactagagagaagcattgtcagaaacttgtttgtgatgactgcattcaactcacagagttgaaggttccttttcatacagcagtttccacacactctttctgtggcatctgcaagtggatgtttgggcctctttgaagatttcgttggaaacgggataatcttcacagaaaagctaaacagaagcattctcagaaacttctttgtgatgtttgctttcaactcacagagttgaactttccttttgagagagaagctttgaaacactctttttctagaatctgcaagtggatatttggagggctttgaggcctgaggtggaaaaggaattatcttcccgtaagaactagatagatgcattctcagaaactactttgtgacgattgcattcaagtcacagaggtgaacattccctttcagagagcactttggaaactctcattgtgtagaatctgcaagtggagatatggaccgctttgaggcctatggtagtaaaggaaacagcttcatataaaaactagacagcagcattctcagaaaactctttgtgacgactgagtttaactcacagggctgaacattcctttggatggagcagtttggaaacacactatctgtaggatctgcaagcggatacttgggcctctctgaggatttcgttggaaacggaataaaccgcacagaactaaacagaagcattctcagaaccttcttcgtgatgtttgcattcaacccacagtgttgaacctttctttgatagttcaggtttgaaacactctttttgtagaaactgcaagtggataactgcacttctttgaggcctatcgtagtaaaggaaataacttcctataaaaacaagacagaagctttctcagaaaattctctgggatgattgagttgaactcacagagcagtactttccttgggatggagtagtttcgaaacacactttctgtagaatctgcaagtggatatttggacctgtctgaggaattcggtgcaaacgggataatttcagctaagtaaacagaagcagtctcagaatcttcttgtgatgtttgcattcaaatcccagaattgaaccatcctttgaaagtgcaggtttgaaacactctttttgcagggtctacaagtggatattcggaccactctgtggacttcgttcgaaacgggtatatcttcacataacatctagacagaagcattctcagaaacttttctgtgatgactgcattcaactcacagagtggaacactccttttgagagcgcagtttagaaactctctttctctggaatctgcaaggggacatgcagacctctttgaaggtttcgttggaaacggaatcatcttcacataaaaattacacagaagcatcctcaggaactccttggtgatgtttgtattcaacttccagagttgaactttccttcggaaagagcagctatgaaacactctttttctagaatctgcaagtggacattgggagggctgtgaggtttgtggtggaaaaggaaatatctccacataaatactagatagaagccttctcagaaactactttgtgatgattgcattcacctcacggagtggagcactcctattgacagagcagtttggaaacactcttcttgtagaatcggctagtggagatttggagcgctttgagtcctatggtagtaaagggaagagcttcacataaaatctagacagaagcattctcagaaaatactttgtgatgattgagtttaacacacagagctgaacattcctttggatggagaaggtttgaaacacactttctgtagaatctgcgagtggatatttggacctctctgaggatttcgttggaaacgggataactgcacctaactaaacggaagcattctcacaaaattctttgtgatgtttgcattcaaatcccagagttgaaacttcctttgatagttcagctttgaaacactctttttgtaggttctgcaagtggatatttggaccagtctttggccttccttcgaaacgggtacatcttcaaataaaatctagacagaagccttctcagaaacttctctgtgatgattgcattcaactcatagcgttgaaccttcctatggatagagcagttttgaatctctctttttgtggaatctgcaagtggttgtgtggtcctctttgaagatgtctttggaaacgggaatatcttcacataaaaactaaacagaagcattctcagaaacttctctgtgatgtttgtgttcaactcacagagtttcacgttgcttttcatagagcagatgagaaacatgcttttcgtagggtctgcaagtggacatttggagagatttcaggcctgtggtggaaaacgaattatcgtcacgtaaaaactagagagaagcattgtcagaaacctgtttttgatgactgcattcaactcacagagttgaaggttccttttcaaacagcagtttccaaacactctttctgtggcatctgcaagtggatgtttgggcctctttgaagatttcattggaaacgggataatcttcacagaaaagctaaacagaagcattctcagaaacttctttgtgatgtttgctttcaactcacagagttgaactttccttttgagagagaagctttgaaacactctttttctagaatctgcaagtggatatttggagggctttgaggcctgaggtggaaaaggaattatcttcccgtaagaactagatagatgcattctcagaaactactttgtgacgattgcattcaagtcacagaagtgaacattccctttcagagagcactttggaaactctcgttgtgtagaatctgcaagtggagatatggaccgctttgaggcctatggtagtaaaggaaacagcttcatataaaaactagacagcagcattctcagaaaactctttgtgacgactgagtttaactcacagggctgaacattcctttggatggagcagtttggaaacacactatctgtaggatctgcaagcggatacttgggcctccctgaggatttcgttggaaacgggatacaccgcacagaactaaacagaagcattctcagaaccttcttcgtgatgtttgcattcaacccacagtgttgaacctttctttgatagttcaggtttgaaacactctttttgtagaaactgcaagtggataactgcacttctttgaggcctatcgtagtaaaggaaataacttcctataaaaacaagacagaagctttctcagaaaattctctgggatgattgagttgaactcacagagcagtactttccttgggatggagtattttcgaaacacactttctgtagaatctgcaagtgggtatttggacctgtctgaggaattcgttgcaaacgggataatttcagcaaagtaaacagaagcagtctcagaatcttcttgtgatgtttgcattcaaatcccagaattgaaccttcctttgaaagttcaggtttgaaacactctttttgcaggatctacaagtggatattcggaccactctgtggacttcgttcgaaacgggtatatcttcacataacatctacacagaagcattctcagaaacttttctgtgatgactgcattcaactcacagagttgaacactccttttgagagcgcagttttgaaactctctttctctggaatctgcaaggggacatgcagacctctttgaaggtttcgttggaaacggaatcatcttcacataaaaattacacagaagcattctcaggaactccttggtgatgtttgtattcaacttccagagttgaactttccttcggaaagagcagctatgaaacactctttttctagaatctgcaagtggacattgggagagctgtgaggtttgtggtggaaaaggaaatatctccacataaatactagatagaagccttctcagaaactactttgtgatgatcgcattcacctcacggagtggagcattcctattgacagagcagtttggaaacactcttcttgtagaatcggctagtggagatttggagcgctttgaggcctatggtagtaaagggaagagcttcacataaaatctagacagaagcattctgagaaaatactttgtgatgattgagtttaacacacagagctgaacattcctttggatggagaaggtttgaaacacactttctgtagaatctgcgagtggatatttggacctctctgaggatttcgttggaaacgggataactgcacctaactaaacggaagcattctcacaaaattctttgtgatgtttgcattcaaatcccagagttgaaccttcctttgatagttcagctttgaaacaccctttttgtaggatctgcaagtggatagttggaccactctttggccttcgttcgaaaagggtacatcttcaaataaaatctagacagaagccttctcagaaacttctctgtgatgattgcattcaactcaaagcgttgaagcctcctatggatagagcagttttgaatctctctttttgtggaatctgcaagtggttgtgtggtcctctttgaagatgtctttggaaacgggaatatcttcacataaaaactaaacagaagcattctcagaaacttctctgtgatgtttgtgttcaactcacagagtttcacgttgcttttcatagagcagatgagaaacatgcttttcgtagggtctgcaagtggacatttggagagatttcaggcctgtggtggaaaacgaattatcgtcacgtaaaaactagagggaagcattgtcagaaacttgtttgtgatgactgcattcaactcacagagttgaaggttccttttcaaacagcagtttccaaacactctttctgtggcatctgcaagtgggtgtttgggcctctttgaagatttcgttggaaacgggataatcttcacagaaaagctaaacagaagcatgctcagaaacttctttgtgatgtttgctttcaactcacagagttgaactttccttttgagagagaagctttgaaacactctttttctagaatctgcaagtggatatttggagggcattgaggcctgaggtggaacaggaattatcttcccgtaagaactagatagatgcattctcagaaactacattgtgacgattgcattcaagtcacagaggtgaacattccctttcagagagcactttggaaactctcgttgtgtagaatctgcaagtggagatatggaccgctttgaggcctatggtagtaaaggaaacagcttcatataaaaactagacagcagcattctcagaaaactctttctgacgactgagtttaactcacagggctgaacattcctttggatggagcagtttggaaacacactatctgtaggatctgcaagcggatacttgggcctctctgaggatttcgttggaaacgggataaaccgcacagaactaaacagaagcattctcagaaccttcttcgtgatgtttgcattcaacccacagtgttgaacctttctttgatagttcaggtttgaaacactctttttgtagaaactgcaagtggataactgcacttctttgaggcctatcgtagtaaaggaaataacttcctataaaaacaagacagaagctttctcagaaaattctctgggatgattgagttgaactcacagagcagtactttctttgggatggagtagtttcgaaacacactttctgtagaatctgcaagtgggtatttggacctgtctgaggaattcgttgcaaacgggataatttcagctaagtaaacagaagcagtctcagaatcttcttgtgatgtttgcattcaaatcccagaattgaaccttcctttgaaagttcaggttggaaacactctttttgcaggatctacaagtggatattcggaccactctgtggacttcgttcgaaacgggtatatcttcacataacatctagacagaagcattctcagaaacttttctgtgatgactgcattcaactcacagagttgaacactccttttgagagcgcagttttgaaactctctttctctggaatctgcaaggggacatgcagacctctttgaaggtttcattggaaacggaatcatcttcacataaaaattacacagaagcatcctcaggaactccttggtgatgtttgtattcaacttccagagttgaactttccttcggaaagagcagctatgaaacactctttttctagaatctgcaggtggacatttggagggctgtgaggtttgtggtggaaaaggaaatatctccacataaatactagatagaagccttctcagaaactactttgtgatgattgcattcacctcacggagtggagcattcctattgacagagcagtttggaaacactcttgttgtagaatcggctagtggagatttggagcgctttgaggcctatggtagtaaagggaagagcttcacataaaatctagacagaagcattctcagaaaatactttgtgatgattgagtttaacacacagagctgaacattcctttggatggagaaggtttgaaacacactttctgtagaatctgtgagtggatatttggacctctctgaggatttcgttggaaacgggataactgcacctaactaaacggaagcgttctcacaaaattctttgtgatgtttgcattcaaatcccagagttgaaccttcctttgatagttcagctttgaaacactctttttgtaggatctgcaggtggatatttggaccactctttggccttcgttcgaaacgggtacatcttcaaataaaatctagacagaagccttctcagaaacttctctgtgacgattgcattcaactcaaagcgttgaaccctcctatggatagagcagttttgaatctctctttttgtggaatctgcaagtggatatgtggtcctctttgaagatgtctttggaaacgggaatatcttcacataaaaactaaacagaagcattctcagaaacttctctgtgatgtttgtgttcaactcacagagcttcacgttgcttttcatagagcagatgagaaacatgcttttcatagggtctgcaagtggacatttggagagctttcaggcctgtggtggaaaacgaattatcgtcacgtaaaaactagagagaagcattgtcagaaacttgtttgtgatgactgcattcaacacacagagttgaaggttccttttcaaacagcagtttccaaacactctttctgtggcatctgcaagtggaggtttgggcctctttgaagatttcgttggaaacgggataatcttcacagaaaagctaaacagaagcatgctcagaaacttctttgtgatgtttgctttcaactcacagagttgaactttccttttgagagagaagctttgaaacactctttttcgagaatctgcaagtggatatttggagggctttgaggcctgaggtggaacaggaattatcttcccgtaagaactagatagatgcattctcagaaactactttgtgacgattgcattcaagtcacagaggtgaacattccctttcagagagcactttggaaactctcgttgtgtagaatctgcaagtggagatatggaccgctttgaggcctatggtagtaaaggaaacagcttcatttaaaaattagacagcagcattctcagaaaactctttgtgacgactgagtttaactcacagggctgaacattcctttggatggagcagtttggaaacacactatctgtaggatctgcaagcggatacttgggcctccctgaggatttcgttggaaacgggataaaccgcacagaactaaacagaagcattctcagaaccttcttcgtgatgtttgcattcaacccacagtgttgaacctttctttgatagttcaggtttgaaacactctttttgtagaaactgcaagtggataactgcacttctttgaggcctatcgtagtaaaggaaataacttcctattaaaacaagacagaagctttctcagaaaattctctgggatgattgagttgaactcagagagcagtactttccttgggatggagtagtttcgaaacacactttctgtagaatctgcaagtggatatttggacctgtctgaggaattcgttgcaaacgggataatttcagctaagtaaacagaagcagtctcagaatcttcttgtgatggttgcattcaaatcccagaattgaaccttcctttgaaagttcaggttggaaacactctttttgcaggatctacaagtggatattcggaccactctgtggacttcgttcgaaacgggtatatcttcacataacatctagacagaaagcattctcagaaacttttctgtgatgactgcattcaactcacagagttgaacactccttttgagagcgcagttttgaaactctctttctctggaatctgcaaggggacatgcagacctctttgaaggtttcgttggaaacggaatcatcttcacataaaaattacacagaagcatcctcaggaactccttggtgatgtttgtattcaacttccagagttgaactttccttcggaaagagcagctatgaaacactctttttctagaatctgcaagtggaccttgggagggctgtgaggtttgtggtggaaaaggaaaaatctccacataaatactagatagaagccttctcagaaactactttgtgatgattgcattcacctcacggagtggagcattcctattgacagagcagtttggaaacactcttgttgtagaatctcctagtggagatttggagcgctttgaggcctatggtagtaaagggaagagcttcacataaaatctagacagaagcattctcagaaaatactttgtgatgattgagtttaacacacagagctgaacattcctttggatggagaaggtttgaaacacactttctgtagaatctgcgagtggatatttggacctctctgaggatttcgttggaaacgggataactgcacctaactaaacggaagcattctcacaaaattctttgtgatgtttgcattcaaatcccagagttgaaccttcctttgatagttcagctttgaaacactctttttgtaggatctgcagggggatatttggaccacgctttggccttcgttcgaaacgggtacatcttcaaataaaatctagacagaagccttctcagaaacttctctgtgacgattgcattcaactcaaagcgttgaaccctccctatggatagagcagttttgaatctctctttttgtggaatctgcaagtggatatgtggtcctctttgaagatgtctttggaaacgggaatatcttcacataaaaactaaacagaagcattctcagaaacttctctgtgatgtttgtgttcaactcacagagtttcacgttgcttttcatagagcagatgagaaacatgcttttcgtagggtctgcaagtggacatttggagagatttcaggccagtggtggaaaacgaattatcgtcacgtaaaaactagagagaaagcattgtcagaaacttgtttgtgatgactgcattcaactcacagagttgcaggttccttttcaaacagtagtttccaaacactctttctgtggcatctgcaagtggatgtttgggcctctttgaagatttcgttggaaacgggataatcttcacagaaaagctaaacagaagcattctcagaaacttctttgtgatgtttgctttcaactcacagagttgaactttccttttgagagagaagctttgaaacactctttttctagaatctgcaagtggatatttggagggctttgaggcctgtggtggaaaaggaattatcttcccgtaagaactagatagatgcattctcagaaactactttgtgacgattgcattcaagtcacagaggtgaacattccctttcagagagcactttggaaactctcgttgtgtagaatctgcaagtggagatatggactgctttgaggcctacggtagtaaaggaaacagcttcatataaaaactagacagcagcattctcagaaaactctttgtgacgactgagtttaactcacagggctgaacattcctttggatggagcagtttggaaacacactatctgtaggatctgcaagcggatacttgggcctccctgaggatttcgttggaaacgggataaactgcacagaactaaacagaagcattctcagaaccttcttcgtgatgtttgcattcaacccacagtgttgaacctttctttgatagttcaggtttgaaacactctttttgtagaaactgcaagtggataactgcacttctttgaggcctatcgtagtaaaggaaataacttcctataaaaacaagacagaagctttctcagaaaattctctgggatgattgagttgaactcacagagcagtactttccttgggatggagtagtttcgaaacacactttctgtagaatctgcaagtggatatttggacctgtctgaggaattcgttgcaaacgggataatttcagctaagtaaacagaagcagtcccagaatcttcttgtgatgtttgcattcaaatcccagaattgaaccttcctttgaaagttcaggttggaaacactctttttgcaggatctacaagtggatattcggaccactctgtggacttcgttcgaaacgggtatatcttcacataacatctagacagaagcattctcagaaacttttctgtgatgactgcattcaactcacagagttgaacactccttttgagagcgcagttttgaaactctctttctctggaatctgcaaggggacatgcagacctctttgaaggtttcgttggaaacggaatcatcttcacataaaaattacacggaagcatcctcaggaactccttggtgatgtttgtattcaacttccagagttgaactttccttcggaaagagcagctatgaaacactctttttctagaatctgcaagtggacattgggagggctgtgaggtttgtggtggaaaaggaaatatctccacataaatactagatagaagccttctcagaaactactttgtgatgattgcattcacctcacggagtggagcattcctattgacagagcagtttggaaacactcttcttgtagaatcggctagtggagatttggagcgctttgagtcctatggtagtaaagggaagagcttcacataaaatctacacagaagcattctcagaaaatactttgtgatgattgagtttaacacacagagctgaacattcctttggatggagaaggtttgaaacacactttctgtagaatctgcgagtggatatttggacctctctgaggatttcgttggaaacgggataactgcacctaactaaacggaagcattctcacaaaattctttgtgatgtttgcattcaaatcccagagttgaaccttcctttgatagttcagctttgaaacactctttttgtaggttctgcaggtggatatttggaccactctttggccttcgttcgaaacgggtacatcttcaaataaaatctagacagaagccttctcagaaacttctctgtgacgattgcattcaactcaaagcgttgaaccctcctatggatagagcggttttgaatctctctttttgtggaatctgcaagtggatatgtggtcctctttgaagatgtctttggaaacgggaatatcttcacataaaaactaaacagaagcattctcagaaacttctctgtgatgtttgtgttcaactcacagagtttcacgttgcttttcatagagcagatgagaaacatgcttttcgtagggtctgcaagtggacatttggagagctttcaggcctgtggtggaaaacgaattatcgtcacgtaaaaactagagagaagcattgtcagaaacttgtttgtgatgactgccttcaactcacagagttgaaggttccttttcaaacagcagtttccaaacactctttctgtggcatctgcaagtggaggtttgggcctctttgaagatttcgttggaaacgggataatcttcacagaaaagctaaacagaagctttctgagaaactttttgtgatgtatgcattcatcacagagatttgaacatttattttcatggagcagtttggaaacagtctttttgcagaatctgcaaagggaaatatgtaggcagtttgaggcctatggtggaaaaggaaatatcttcatataagaactacacagatgcattctcagaaactactttgtgacgattgcattcaagtcacagaggtgaacattccctttcagagagcactttggaaactctcgttgtgtagaatctgcaagtggagatatggaccgctttgaggccgatggtagtaaaggaaacagcttcatataaaaactagacagcagcattctcagaaaactctttgtgacgactgagattaactcacagggctgaacattcctttggatggagcagtttggaaacacactatctgtaggatctgcaagcggatacttgggcctctctgaggattgcgttggaaacgggataaaccgcacagaactaaacagaagcattctcagaaccttcttcgtgatgtttgcattcaacccacagtgttgaacctttctttgatagttcaggtttgaaacactctttttgtagaaactgcaagtggataactgcacttctttgaggcctatcgtagtaaaggaaataacttcctataaaaacaagacagaagctttctcagaaaattctctgggatgattgacctgaactcacagagcagtactttccttgggatggagtagtttcgaaacacactttctgtagaatctgcaagtggatatttggacctgtctgaggaattcgttgcaaacgggataatttcagctaagtaaacagaagcagtctcagaatcttcttgtgatgtttgcattcaaatcccagaattgaaccttcctttgaaagttcaggttggaaacactctttttgcaggatctacaagtggatattcggaccactctgtggacttcgttcgaaacgggtatatcttcacataacatctagacagaagcattctcagaaacttttctgtgatgactgcattcaactcacagagttgaacactccttttgagagcgcagttttgaaactctctttctctggaatctgcaaggggacatgcagacctctttgaaggtttcgttggaaacggaatcatcttcacataaaaattacacagaagcattctcaggaactccttggtgatgtttgtattcaacttccagagttgaactttccttcggaaagagcagctatgaaacactctttttctagaatctgcaagtggacattgggagggctgtgaggtttgtggtggaaaaggaaatatctccacgtaactactagatagaagccttctcagaaactactttgtgatgattgcattcacctcacggagtggagcattcctattgacagagcagtttggaaacactcttcttgtagaatcggctagtggagatttggagcgctttgaggcctatggtagtaaagggaagagcttcacataaaatctagacagaagcattctcagaaaatactttgtgatgattgagtttagcacacagagctgaacattcctttggatggagaaggtttgaaacacactttctgtagaatctgcgagtggatatttggacctctctgaggatttcgttggaaacgggataactgcacctaactaaacggaagcattctcacaaaattctttgtgatgtttgcattcaaatcccagagttgaaccttcctttgatagttcagctttgaaacactctttttgtaggatctgcaggtggatatttggaccactctttggccttcgttcgaaaagggtacatcttcaaataaaatctagacagaagccttctcagaaacttctctgtgacgattgcattcaactcaaagcgttgaaccctcctatggatagagcagttttgaatctctctttttgtggaatctgcaagtggatatgtggtcctctttgaagatgtctttggaaacgggaatatcttcacataaaaactaaacagaagcattctcagaaacttctctgtgatgtttgtgttcaactcacagagtttcacgttgcttttcatagagcagatgagaaacaagcttttcgtagggtctgcaagtggacatttggagagatttcaggcgtgtggtggaaaacgaattatcgtcacgtaaaaactagagagaaggattgtcagaaacttgtttgtgatgactgcattcaactcacagagttgaaggttccttttcaaacagcagtttccaaacactctttctgtggcatctgcaagtggatgtttgggcctctttgaagatttcgttggaaacgggataatcttcacagaaaagctaaacagaagcattctcagaaacttctttgtgatgtttgctttcaactcacagagttgaactttccttttgagagagaagctttgaaacactctttttctagaatctgcaagtggatatttggagggctttgaggcctgaggtggaaaaggaattatcttcccgtaagaactagatagatgcattctcagaaactactttgtgacgattgcattcaagtcacagaggtgaacattccctttcagagagcactttggaaactctcgttgtgtagaatctgcaagtggagatatggaccgctttgaggcctatggtagtaaaggaaacagcttcatataaaaactagacagcagcattctcagaaaactctttgtgacgactgagtttaactcacagggctgaacattcctttggatggagcagtttggaaacacactatctgtaggatctgcaagcggatacttgggcctccctgacgatttcgttggaaacgggataaaccgcacagaactaaacagaagcattctcagaaccttcttcgtgatgtttgcattcaacccacagtgttgaacctttctttgatagttcaggtttgaaacactctttttgtagaaactgcaagtggataactgcacttctttgaggcctatcgtagtaaaggaaataacttcctataaaaacaagacagaaagctttctcagaaaattctctgggatgattgagttgaactcacagagcagtactttccttgggatggagtagtttcgaaacacactttctgtagaatctgcaagtggatatttggacctgtctgaggaattcgttgcaaacgggataatttcagctaagtaaacagaagcagtctcagaatcttcttgtgatgtttgcattcaaatcccagaattgaaccttcctttgaaagttcaggttggaaacactctttttgcaggatctacaagtggatattcggaccactctgtggacttcgttcgaaaccggtatatcttcacataacatctagacagaagcattctcagaaacttttctgtgatgactgcattcaactcacagagttgaacactccttttgagagcgcagttttgaaactctctttctctggaatctgcaaggggacatgcagacctctttgaaggtttcgttggaaacggaatcatcttcacataaaaattacacagaagcatcctcaggaactccttggtgatgtttgtattcaacttccagaggtgaactttccttcggaaagagcagctatgaaacactctttttctagaatctgcaagtggacattgggagggctgtgaggtttgtggtggaaaaggaaatatctccacataaatactagatagaagccttctcagaaactactttgtgatgatcgcattcacctcacggagtggagcattcctattgacagagcagtttggaaacactcttcttgtagaatcggctagtggagatttggagcgctttgaggcctatggtagtaaagggaagagcttcacataaaatctagacagaagcattctcagaaaatactttgtgatgattgagtttaacacacagagctgaacattcctttggatggagaaggtttgaaacacactttctgtagaatctgcgagtggatatttggacctctcggaggatttcgttggaaacgggataactgcacataactaaacggaagcattctcacaaaattctttgtgatgtttgcattcaaatcccagagttgaaccttcctttgatagttcagctttgaaacactctttttgtaggttctgcaggtggatatttggaccactctttggccttcgttcgaaacgggtacatcttcaaataaaatctagacagaagccttctcagaaacttctctgtgacgattgcattcaactcaaagcgttgaaccctcctatggatagagcagttttgaatctctctttttgtggaatctgcaagtggatatgtggtcctctttgaagatgtctttggaaacgggaatatcttcacataaaaactaaacagaagcattctcagaaacttctctgtgatgtttgtgtccaaatcacagagtttcacgttgcttttcatagagcagatgagaaacatgcttttcgtagggtctgcaagtggacatttggagagatttcaagcctgtggtggaaaacgaattatcgtcacgtaaaaactagagggaaagcattgtcagaaacttgtttgtgatgactgcattcaactcacagagttgaaggttccttttcaaacagcagtttccaaacactctttctgtggcatctgcaagtggatgtttgggcctctttgaagatttcgttggaaacgggataatcttcacagaaaagctaaacagaagcattcccagaaacttctttgtgatgtttgctttcaactcacagagttgaactttccttttgagagagaagctttgaaacactctttttctagaatctgcaagtggatatttgcagggctttgaggcctgtggtggaaaaggaattatcttcccgtaagaactagatagatgcattctcagaaactactttgtgacgattgcattcaagtcacagaggtgaacattccctttcgagagcactttggaaactctcgttgtgtagaatctgcaagtggagatatggaccgctttgaggcctatggtagtaaaggaaacagcttcatataaaaactagacagcagcattctcagaaaactctttgtgacgactgagtttaactcacagggctgaacattcctttggatggagcagtttggaaacacactatctgtaggatctgcaagcggatacttgggcctctctgaggatttcgttggaaacgggataaaccgcacagaacgaaacagaagcattctcagaaccttcttcgttacgtttgcattcaacccacagtgttgaacctttctttgatagttcaggtttgaaacactctttttgtagaaactgcaagtggataactgcacttctttgaggcctatcgtagtaaaggaaataacttcctataaaaacaagacagaagctttctcagaaaattctctgggatgattgagttgaactcacagagcagtactttctttgggatggagtagtttcgaaacacactttctgtacaatctgcaagtggatatttggacctgtctgaggaattcgttgcaaacgggataatttcagctaagtaaacagaagcagtctcagaatcttcttgtgatgtttgcattcaaatcccagaattgaaccttcctttgaaagttcaggttggaaacactctttttgcaggatctacaagtggatattcggaccactctgtggacttcgttcgaaacgggtatatcttcacataacatctagacagaagcattctcagaaacttttctgtgatgactgcattcaactcacagagttgaacactccttttgagagcgcagttttgaaactctctttctctggaatctgcaaggggacatgcagacctctttgaaggtttcgttggaaacggaatcatcttcacataaaaattacccagaggcatcctcaggtaactccttggtgatgtttgtattcaacttccagagttgaactttccttcggaaagagcagctatgaaacactctctttctagaatctgcaagtggacattgggagggctgtgaggtttgtggtggaaaaggaaatatctccacataaatactagatagaagccttctcagaaactactttgtgatgattgcattcacctcacggagtggagcattcctattgacagagcagtttggaaacactcttgttgtagaatctcctagtggagatttggagcgctttgaggcctatggtagtaaagggaagagcttcacataaaatctagacagaagcattctcagaaaatactttgtgatgattgagtttaacacacagagctgaacattcctttggatggagaaggtatgaaacacactttctgtagaatctgcgagtggatatttggacctctctgaggatttcgttggaaacgggataactgcacctaactaaacggaagcattctcacaaaattctttgtgatgtttgcattcaaatcccagagttgaaccttcctttgatagttcagctttgaaacactctttttgtaggatctgcaggtggatatttggaccactctttggccttcgttcgaaatgggtacatcttcaaataaaatctagacagaagccttctcagaaacttctctgtgatgattgcattcaactgaaggcgttgaaccctcctatggatagggcagttttgaatctctctttttgtggaatctgcaagtggatatgtggtcctctttgaagatgtctttggaaacgggaatatcttcacataaaaactaaacagaagcattctcataaacttctctgtgatgtttgtgtccaaataacagagtttcacgttgcttttcatagagcagatgagaaacatgcttttcgtagggtctgcaagtggacatttggagagatttcaggcctgtggtggaaaacgaattatcgtcacgtaaaaactagagggaagcattgtcagaaacttgtttgtgatgactgcattcaactcacagagttgaaggttccttttcaaacagcagtttccaaacactctttctgtggcatctgcaagtggatgtttgggcctctttgaagatttcgttggaaacgggataatcttcacagaaaagctaaacagaagcattctcagaaacttctttgtgatgtttgctttcaactcacagagttgaactttccttttgagagagaagctttgaaacactctttttcttgaatctgcaagtggatatttggagcgctttgaggcctgtggtggaaaaggaattatcttcccacaagaactagatagatgcattctcagaaagtactttgtgacgattgcattcaagtcacagaggtgaacattccctttcacagagcactttggaaactctcgttgtgtagaatctgcaagtggagatatggactgctttgaggcctatggtagtaaaggaaacagcttcatataaaaactagacagcagcattctcagaaaactctttgtgacgactgagtttaactcacagggctgaacattcctttggatggagcagtttggaaacacactatctgtaggatctgcaagcggatacttgggcctccctgaggatttcgttggaaacgggataaaccgcacagaactaaacagaagcattctcagaaccttcttcgttacgtttgcattcaacccacagtgttgaacctttctttgatagttcaggtttgaaacactctttttgtagaaactgcaagtggataactgcactttctttgaggcctatcgtagtaaaggaaataacttcctataaaaacaagacagaagctttctcagaaaattctctgggatgattgagttgaactcacagagcagtactttccttgggatggagtagtttcgaaacacactttctgtagaatctgcaagtggatatttggacctgtctgaggaattcgttgcaaacgggataatttcagctaagtaaacagaagcagtctcagaatcttcttgtgatgtttgcattcaaatcccagaattgaaccatcctttgaaagtgcaggtttgaaacactctttttgcagggtctacaagtggatattcggaccactctgtggacttcgatcgaaacgggtatatcttcacataacatctagacagaagcattctcagaaacttttctgtgatgactgcattcaactcacagagttgaacactccttttgagagcgcagttttgaaaccctttctctggaatctgcaaggggacatgcagacctctttgaaggtttcgttggaaacggaatcatcttcacataaaaattacacagaagcattctcaggaactccttggtgatgtttgtattcaacttccagagttgaactttccttcggaaagagcagctatgaaacactctttttctagaatctgcaagtggacattgggagggctgtgaggattgtggtggaaaaggaaatatctccacgtaaatactagatagaagccttctcagaaactactttgtgatgattggattcacctcacggagtggagcattcctattgacagagcagtttggaaacactcttgttgtagaatctgctagtggagatttggagcgctttgaggcctatggtagtaaagggaagagcttcacataaaatcaagacagaagcattctcagaaaatactttgtgatgattgagtttaacacacagagctgaacattcctttggatggagaaggtttgaaacacactttctgtagaatctgcgagtggatatttggacctctctgaggatttcgttggaaacgggataactgcacctaactaaacggaagcattctcacaaaattctttgtgatgtttgcattcaaatcccagagttgaaccttcctttgatagttcagctttgaaacactctttttgtaggatctgcaagtggatatttggaccactctttggccttcgttcgaaacgggtacatcttcaaatgaaatctagacagaagccttctcagaaacttctctgtgacgattgcattcaactcaaagcgttgaaccctccctatggatagagcagttttgaatctctctttttgtggaatctgcaagtggatatgtggtcctctttgaagatgtctttggaaacgggaatatcttcacataaaaactaaacagaagcattctcagaaacttctctgtgatgtttgtgttcaactcacagagtttcacgttgcttttcatagagcagatgagaaacatgcttttcgtagggtctgcaagtggacatttggagagatttcaggcctgtggtggaaaacgaattatcgtcacgtaaaaactagagggaagcattgtcagaaacttgtttgtgatgactgcattccactcacagagttgaaggttccttttcaaacagcagtttccaaacactctttctgtggcatctgcaagtggatgtttgggcctctttgaagatttcgttggaaacgggataatcttcacagaaaagctaaacagaagcattctcagaaacttctttgtgatgtttgctttcaactcacagagttgaactttccttttgagagagaagctttgaaacactctttttctaccatctgcaagtgcatatttggagggctttgaggcctgtggtggaaaaggaattatcttcccgtaagaactagatagatgcattctcagaaactactttgtgacgattgcattcaagtcacagaggtgaacattccctttcagagagcactttggaaactctcgttgtgtagaatctgcaagtggagatatggaccgctttgaggcctatggtagtaaaggaaacagcttcatataaaaactagacagcagcattctcagaaaactctttgtgacgactgagtttaactcacagagctgaacattcctttggatggagcagtttggaaacacactatctgtaggatctgcaagcggatacttgggcctctctgaggattgcgttggaaacgggataaaccgcacagaactaaacagaagcattctcagaaccttcttcatgacgtttgcattcaacccacagtgttgaacctttctttgagagttcaggtttgaaacactctttttgtagagactgcaagtggataactgcacttctttgaggcctatcgtattaaaggaaataacttcctataaaaacaagacagaagctttctcagaaaattctctgggatgattgagttgaactcaccagagcagtactttccttgggatggagtagtttcgaaacacactttctgtagaatctgcaagtggatatttggacctgtctgaggaattcgttgcaaacgggataatttcagctaagtaaacagaagcagtctcagaaacttcttgtgatgtttgcattcaaatcccagaattgaaccttcctttgaaagttcaggttggaaacactctttatgcaggatctacaagtggatattcggaccactctgtggacttcgttcgaaacgggtatatcttcacataacatctagacagaagcattctcagaaacttttctgtgatgactgcattcaactcagagagttgaacactccttttgagagcgcagttttgaaactctctttctctggaatctgcaaggggacatgcagacctctttgaaggtttcgttggaaacggaatcatcttcacataaaaattacacggaagcattctcaggaactccttggtgatgtttgtattcaacttccagagttgaactttccttcggaaagagcagctatgaaacactctttttctagaatctgcaagtggacattgggagggctgtgaggtttgtggtggaaaaggaaatatctccacataaatactagatagaagccttctcagaaactactttgtgatgattgcattcacctcacggagtggagcattcctattgacagagcagtttggaaacactcttcttgtagaatcggctagtggagatttggagcgctttgaggcctatggtagtaaagggaagagcttcacataaaatctagacggaaagcattctcagaaaatactttgtgatgattgagtttaacacacagagctgaacattcctttggatggagaaggtttgaaccacactttctgtagaatctgcgagtggatatttggacctctctgaggatttcgttggaaaccggataactgcacctaactaaacggaagcattctcacaaaattctttgtgatgtttgcattcaaatcccagagttgacccttcctttgatagttcagctttgaaacactctttttgtaggatctgcaagtggatatttggaccactctttggccttcgttcgaaacgggtacatcttcaaataaaatctagacagaagccttctgagaaccttctctgtgatgattgcattcaactcaaagcgttggaccctcctatggatagagcagttttgaatctctctttttgtggaatctgcaagtggatgtgtggtcctctttgaagatgtctttggaaacgggaatatcttcacataaaaactaaacagaagcattctcagaaacttctctgtgatgtttgtgttcaactcacagagtttcacgttgcttttcatagagcagatgagaaacatgcttttcgtagggtctgcaagtggacatttggagagctttcaggcctgtggtggaaaacgaattatcgtcacgtaaaaactagagagaagcattgtcagaaacttgtttgtgatgactgcattcaactcacagagttgaaggttccttttcaaacagcagtttccaaacactctttctgtggcatctgcaagtggatgtttgggcctctttgaagatttcgttggaaacgggataatcttcacagaaaagctaaacagaagcattctcagaaacttctttgtgatgtttgctttcaactcacagagttgaactttccttttgagagagaagctttgaaacactctttttctagaatctgcaagtggatatttggagggctttgaggcctgaggtggaaaaggaatgatcttcccgtaagaactagatagatgcattctcagaaactactttgtgacgattgcattcaagtcacagaggtgaacattccctttcacagagcactttggaaactctcgttgtgtagaatctgcaagtggagatatggaccgctttgaggcctatggtagtaaaggaaacagcttcatataaaaactagacagcagcattctcagaaaactctttgtgacgactgagtttaactcacagggctgaacattcctttgcatggagcagtttggaaacacactatctgtaggatctgcaagcggatacttgggcctctctgaggatttcgttggaaacgggataaaccgcacagaactaaacagaagcattctcagaaccttcttcgtgatgtttgcattcaacccacagtgttgaacctttctttgatagttcaggtttgaaacactctttttgtagaaactgcaagtggataactgcacttctttgaggcctatcgtagtaaaggaaataacttcctataaaaacaagacagaagctttctcagaaaattctctgggatgattgagttgaactcacagagcagtcctttccttgggatggagtagtttcgaaacacactttctgtagaatctgcaagtggatatttggacctgtctgaggaattcgttgcaaacgggataatttcagctaagtaaacagaagcagtctcagaatcttcttgtgatgtttgcattgaaatcccagaattgaaccttcctttgaaagttcaggttggaaacactctttttgcaggatctacaagtggatattcggaccactctgtggacttcgttcgaaacgggtatatcttcacataacatgctagacagaagcattctcagaaacttttctgtgatgactgcattcaactcacagagttgaacactccttttgagagcgcagttttgaaactctctttctctggaatctgcaaggggacatgcagacctctttgaaggtttcgttggaaacggaatcatcttcacataaaaattacacagaagcattctcaggaactccttggtgatgtttgtattcaacttccagagttgaactttccttcggaaagagcagctatgaaacactctttttctagaatctgcaagtggacattgggagggctgtgaggtttgtggtggaaaaggaaatatctccacgtaaatactagatagaagccttctcagaaactactttgttatgattgcattcacctcacggagtggagcattcctattgacagagcagtttggaaacactcttgttgtagaatctcctagtggagatttggagcgctttgaggcctatggtagtaaagggaagagcttcacataaaatctagacagaagcattctgagaaaatactttgtgatgattgagtttaacacacagagctgaacattcctttggatggagaaggtttgaaacacactttctgtagaatctgcgagtggatatttggacctctctgaggatttcgtgggaaacgggataactgcacctaactaaacggaagcattctcacaaaattctttgtgatgtttgcattcaaatcccagagttgaaccgtcctttgatagttcagctttgaaacactctttttgtaggatctgcaggtggatatttggaccactctttggccttcattcgaaacgggtacatcttcaaataaaatctagacagaagccttctcagaaacttctctgtgacgattgcattcaactcaaagcgttgaaccctcctatggatagagcagttttgaatctctctttttctggaatctgcaagtggatatgtggtcctctttgaagatgtctttggaaacgggaatatcttcacataaaaactaaacagaagcattctcagaaacttctctgtgatgtttgtgttcaactcacagagtttcacgttgcttttcatacagcagatgagaaacatgcttttcgtagggtctgcaagtggacatttggagagatttcaggcctgtggtggaaaacgaattatcgtcacgtaaaaactagagagaagcattgtcagaaacttgtttgtgatgactgcattcaactcacagagttgaaggttccttttcaaacagcagtttccaaacactctttctgtggcatctgcaagtggatgcttgggcctctttgaagatttcgttggaaacgggataatcttcacagaaaagctaaacagaagcattctcagaaacttctttgtgatgtttgctttcaactcacagcagttgaactttccttttgagagagaagctttgaaacactctttttctagaatctgcaagtggatatttggagggctttgaggcctgtggtggaaaaggaattatcttcccgtaagaactagatagatgcattctcagaaactactttgtgacgattgcattcaagtcacagaggtgaacattacctttcagagagcactttggaaactctcgttgtgtagaatctgcaagtggagatatggaccgctttgaggcctatggtagtaaaggaaacagcttcatataaaaactagacagcagcattctcagaaaactctttgtgacgactgagtttaactcacagggctgcacattcctttggatggagcagtttggaaacacactatctgtaggatctgcaagcggatacttgggcctctctgaggatttcgttggaaacggaataaaccgcacagaactaaacagaagcattctcagaaccttcttcgtgatgtttgcattcaacccacagtgttgaacctttctttgatagttcaggtttgaaacactctttttgtagaaactgcaagtggataactgcacttctttgaggcctatcgtagtaaaggaaataacttcctataaaaacaagacagaagctttctcagaaaattctctgggaagattgagttgaactcacagagcagtactttccttgggatggagtagtttcgaaacacactttctgtagaatctgcaagtggatatttggacctgtctgaggaattcgttgcaaacgggataatttcagctaagtaaacagaagcagtctcagaatcttcttgtgatgtttgcattcaaatcccagaatggaaccttcctttgaaagttcaggttggaaacactctttttgcaggatctacaagtggatattcggaccactctgtggacttcgttcgaaacgggtatatcttcacataacatctagacagaagcattctcagaaacttttctgtgatgactgcattcaactcacagagttgaacactccttttgagagtgcagttttgaaactctctttctctggaatctgcaaggggacatgcagacctctttgaaggtttcgttggaaacggaatcatcttcacataaaaattacacagaagcatcctcaggaactccttggtgatgtttgtattcaacttccagagttgaactttccttcggaaagagcagctatgaaacactctttttctagaatctgcaagtggacattgggagggctgtgaggtttgtggtggaaaaggaaatatctccacataaatactagttagaagccttctcagaaactactttgtgatgattgcattcacctcacggagtggagcattcctattgacagagcagtttggaaacactcttctcgtagaatcggctagtggagatttggagcgctttgaggcctatggtagtaaagggaagagcttcacataaaatctagacagaagcattctcagaaaatactttgtgatgattgagtttaacacacagagctgaacattacctttgcgatggagcaggtttgaaacacactttctatagaatctgcgagtggatatttggacctctctgaggatttcgttggaaacgggataactgcacctaactaaatggaagcattctcacaaaattctttgtgatgtttgcattcaaatcccagaagttgaaccttcctttgatagttcagctttgaaacactctttttgtaggatctgcaggtggatatttggaccactctttggccttcgttcgaaacgggtacatcttcaaataaaatctagacagaagccttctcagaaacttctctgtgacgattgcattcaactcaaagcgttgaaccctcctatggatagagcagttttgaatctctctttttgtggaatctgcaagtggatatgtggtcctctttgaagatgtctttggaaacgggaatatcttcacattaaaactaaacagaagcattctcagaaacttctctgtgatgtttgtgttcaactcacagagtttcacgttgcttttcatagagcagatgagaaacatgcttttcgtagggtctgcaagtggacatttggagagatttccggcctgtggtggaaaacgaattatcgtcacgtaaaaactagagagaagcattgtcagaaacttgtttgtgatgactgcattcaacacacagagttgaaggttccttttcaaacagcagtttccaaacactctttctgtggcatctgcaagtggatgtttgggcctctttgaagatttcgttggaaacgggatactcttcacagaaaagctaaacagaagcattgtcagaaacttctttgtgatgtttgcattctactcacagagttgaactttccttttgagagagaagctttgaaacactctttctctagaatctgcaagtggatatttggagggctttgaggcctgtggtggaaaaggaattaacttcccgtaaaaactagatagatgcattctcagaaactactttgtgacgattgcattcaagtcacagaggtgaacattccctttcagagagcactttggaaactctcgttgtgtagaatctgcaagtggagatatggaccgctttgaggcctatggtagtaaaggaaacagcttcatataaaaactagacagcaagcattctcagaaaactctttgtgacgactgagtttaactcacagggctgaacattcctttggatggagcagtttcgaaacacactacttgtagaatctgccagtggatatttgggcctctctgaggatttcgctggaaacgggataaaccgcccagaaataaacagaagcattctcagaacattcttcgtgatgtttgcgttcaactcacagctttgaacctttccttgatacttcgggtttgaaacactctttttgtagaaactgcaagtggataattgcacttctttgaggcctatcctagtaaaggaaataacttcatataaaaacaagacagaaactttctcagaaaatcctctgggatgattgagttgaactcacagagctgtactttccttggcatggagttgtttcgaaacacactttctgtagaatctgcaaggggatatttggacctgtctgaggaattcgatgtaaatgggataatttcagctaactacacagaagcagtctcagaatcttcttgtgatgtttgcattcaaatcccagaattgaaccttcctttgaaagttcaggttggaaacactctttttgcaggatctacaagtggatattcggaccactctgtggacttcgttcgaaacgggtatatcttcacataacatctagacagaagcattctcagaaacttttctgtgatgactgcattcaactcacagagttgaacactccttttgagagcgcagttttgaaactctctttctctggaatctgcaaggggacatgcagacctcattgaaggttttgttggaaacagaatcatcttcacataaaaattacacagaagcattctcaggaactccttggtcatgtttgtattcaacttccagagttgaactttccttcggaaaaagcagctatgaaacactctttttctagaatctgcaagtggacattgggagggctgtgaggtttgtggtggaaaaggaaatatctccacataaatactagatagaagccttctcagaaactactttgtgatgattgcattcacctcacggagtggagcattcctattgacagagcagtttggaaacactcttgttgtagaatctgctagtggaggtttggagcgctttgaggcctatggtagtaaagggaagagcttcacataaaatctagacagaagcattctcagaaaatactttgtgatgattgagtttagcacacagagctgaacattcctttggatggagcaggtttgaaacacactttctgtagaacctgcgagtggatatttggacctctctgaggatttcgttggaaacgggataactgcacctaactaaacggaagcattctcacaaaattctttgtgatgtttgcattcaaatcccagagttgaaccttcctttgatagttcagctttgaaacactctttttgtaggatctgcaggtggatatttggaccactctttggccttcgttcgaaacgggtacatcttcaaataaaatctagacagaagccttctcagaaacttctctgtgacgattgcattcaactcaaagagttgaaccctcctatggatagagcagttttgaatctctctttttgtggaatctgcaagtggatatgtggtcctctttgaagatgtctttggaaacgggaatatcttcacataaaaactaaacagaagcattctcagaaacttctctgtgatgtttgtgttcaactcacagagtttcacgttgcttttcatagagcagatgagaaatatgcttttcgtagggtctgcaagtggacatttggagagatttcaggcctgtggtggaaaacgaattatcgtcacgtaaaaactagagagaagcattgtcagaaacttgtttgtgatgactgcattcaactcacagagttgaaggttccttttcaaacagcagtttccaaacactctttctgtggcatctgcaagtggatgtttgggcctctttgaagatttcgttggaaacgggataatcttcacagaaaagctaaacagaagcattctcagaaacttctttgtgatgtttgctttcaactcacagagttgaactttccttttgagagagaagctttgaaacactctttttctagaatctgcaagtggatatttggagggctttgaggcctgtggtggaaaaggaattatcttcccgtaagaactagatagatgcattctcagaaactactttgtgacgattgcattcaagtcacagaggtgaacattccctttcacagagcactttggaaactctcgttgtgtagaatctgcaagtggagatatggaccgctttgaggcctatggtagtaaaggaaacagcttcatataaaaactagacagcagcattctcagaaaactctttgtgacgactgagtttaactcacagggctgaacattcctttggatggagcagtttggaaacacactatctgtaggatctgcaagcggatacttgggcctctctgaggatttcgttggaaacggaataaaccgcacagaactaaacagaagcattctcagaaccttcttcgtgatgtttgcattcaacccacagtgttgaacctttctttgatagttcaggtttgaaacactctttttgtagaaactgcaagtggataactgcacttctttgaggcctatcgtagtaaaggaaataacttcctataaaaacaagacagaagctttctcagaaaattctctgggatgattgagttgaactcacagtgcagtactttccttgggatggagtagtttcgaaacacactttctgtagaatctgcaagtggatatttggacctgtctgaggaattcgttgcaaacgggataatttcagctaagtaaacagaagcagtctcagaatcttcttgtgatgtttgcattcaaatcccagaattgaaccttcctttgaaagttcaggttggaaacactctttttgcaggatctacaagtggatattcggaccactctgtggacttcgttcgaaacgggtatatcttcacataacatctagacagaagcattctcagaaacttttctgtgatgactgtattcaactcacagagttgaacactcctttcgagagcgcagttttgaaactctctttctctggaatctgcaaggggacatgcagacctctttgaaggtttcgttggaaacggaatcatcttcacataaaaattacacagaagcattctcaggaactccttggtgatgtttgtattcaacttccagagttgaactttccttcggaaagagcagctatgaaacactctttttctagaatctgcaagtggacattgggagggctgtgaggtttgtggtggaaaaggaaatatctccacgtaaatactagatagaagccttctcagaaactactttgtgatgattgcattcacctcacggagtggagcattcctattgacagagcagtttggaaacactcttctcgtagaatcggctagtggagatttggagcgctttgaggcctatggtagtaaagggaagagcttcacataaaatctagacagaagcattctcagaaaatactttgtgatgattgagtttaacacacagagctgaacattcctttggatggagaaggtttgaaacacactttctgtagaatctgcgagtggatatttggacctctctgaggatttcgttggaaacgggataactgcacctaactaaacggaagcattctcacaaaattctttgtgatgtttgcattcaaatcccagagttgaaccttcctttgatagttcagctttgaaacactctttttgtaggatctgcaggtggatatttggaccactctttggccttcgttcgaaaagggaacatcttcaaataaaatctagacagaagccttctcagaaacttctctgtgacgattgcattcaactcaaagcgttgaaccctcctatggatagagcagttttgaatctctctttttgtggaatctgcaagtggatatgtggtcctctttgaagatgtctttggaaacgggaatatcttcacataaaaactaaacagaagcattctcagaaacttctctgtgatgtttgtgttcaactcacagagtatcacgttgcttttcatagagcagatgagaaacatgcttttcgtagggtctgcaagtgaacatttggagagctttcaggcctgtggtggaaaacgaattatcgtcacgttaaaaactagagagaagcattgtcagaaacttgtttgtgatgactgcattcaactcacagagttgaaggttccttttcaaacagcagtttccaaacactctttctgtggcatctgcaagtggatgtttgggcctctttgaagatttcgttggaaacgggataatcttcacagaaaagctaaacagaagcattctcagaaacttctttgtgatgtttgctttcaactcacagagttgaactttccttttgagagagaagctttgaaacactctttttctagaatctgcaagtggacattgggagggctgtgaggtttgtggtggaaaaggaaatatctcctcataaatactagatagaagccttctcagaaactactttgtgatgattgcattcacctcacggagtggagcattcctattgacagagcagtttggaaacactcttgttgtagaatctgctagtggagatttggagcgctttgaggcctatggtagtaaagggaagagcttcacataaaatctagacagaaagcattctcagaaaatactttgtgatgattgagtttaacacacagagctgaacattcctttggatggagaaggtttgaaacacactttctgtagaatctgcgagtggatatttggacctctctgaggatttcgttggaaacgggataactgcacctaactaaacggaagcattctcacaaaattcttcgtgatgtttgcattcaaatcccagagttgaaccttcctttgatagttcagctttgaaacactctttttgtaggatctgcaggtggatatttggaccactctttggccttcgttcgaaaagggtacatcttcaaataaaatctagacagaagccatctcagaaacttctctgtgacgattgcattcaactcaaagcgttgaaccctcctatggatagagcagttttgaatctctctttttgtggaatctgcaagtggatatgtggtcctctttgaagatgtctttggaaacgggaatatcttcacattaaaactaaacagaagcattctcagaaacttctctgtgatgtttgtgttcaactcacagagcttcacgttgcttttcatagagcagatgagaaacatgcttttcgtagggtctgcaagtggacatttggagagctttcaggcctgtggtggaaaacgaattatcgtcacgtaaaaactagagagaagcattgtcagaaacttgtttgtgatgattgcattcaactcacagagttgaaggttccctttcaaacagcagtttccaaacacactttctgtggaatctgcaattggatagttggacctctttgaagatgtctttggaaacgggataatcttcacagaaaagctaaacagaagcattgtcagaaacttctttgtgatgtttgcattctactcacagagttgaactttccttttgagagagaagctttgaaacactctttctctagaatctgcaagtggatatttggagggctttgaggcctgtggtggaaaaggaattaacttcccgtaaaaactagatagatgcattttcagaaactactttgtgacgattgcattcaagtcacagaggtgaacattccctttcagagagcactttggaaactctcgttgtgtagaatctgcaagtggagatatggaccgctttgaggcctatggtagtaaaggaaacagcttcatataaaaactagacagcagcattctcagaaaactctttgtgacgactgagtttaactcacagggctgaacattcctttggatggagcagtttggaaacacactatctgtaggatctgcaagcggatacttgggtctctctgagaatttcgttggaaacgggataaaccgcacagaactaaacagaagcattctcagaaccttcttcgtgatgtttgcattcaacccacagtgttgaacctttctttgatagttaacgtttgaaacactctttttgtagaaactgcaagtggataactgcacttctttgaggcctatcgtagtaaaggaaataacttcctataaaaacaagacagaagctttctcagaaaattctctgggatgattgagttgaactcacagagcagtactttccttgggatggagtagtttcgaaacacactttctgtagaatctgcaagtggatatttggacctgtctgaggaattctttgcaaacgggataatttcagctaagtaaacagaagcagtctcagaatcttcttgtgatgtttgcattcaaatcccagaattgaaccttcctttgaaagttcaggttggaaacactctttttgcaggatctacaagtggatattcggaccactctgtggacttcattcgaaacggctatatcttcacataacatctagacagaagcattctcagaaacttttctgtgatgactgcattcaactcacagagttgaacactccttttgagagcgcagttttgaaactccctttctctggaatctgcaaggggacatgcagacctcttcgaaggtttcgttggaaacggaatcatcttcacataaaaattacacagaagcatcctcaggaactccttggtgatgtttgtattcaacttccagagttgaactttccttcggaaagagcagctatgaaacactctttttctagaatctgcaagtggacattgggagggctgtgaggtttgtggtggaaaaggaaatatctccacataaatactagatagaagccttctcagaaactcctttgtgatgattgcattcacctcacggagtggagcattcctattgacagaacagtttggaaacactcttgttgtagaatctcctagtggagatttggagcgctttgaggcctatggtagtaaagggaagagcttcacataaaatctagacagaagcattctcagaaaatactttgtgatgattgagtttaacacacagagctgaacattcctttggatggagaaggtttgaaacacactttctgtagaatctgcgagtggatatttggacctctctgaggatttcgttggaaacgggataactgcacctaaataaacggaagcattctcacaaaattctttgtgatgtttgcattcaaatcccagagttgacccttcctttgatagttcagctttgaaacactctttttgtaggatctgaaagtggatatttggaccactctttggccttcgttcgaaacgggtacatcttcaaataaaatctagacagaagccttctcagaaacttctctgtgacgattgcattcaactcaaagagttgaaccctcctatggatagagcagttttgaatctctctttttgtggaatctgcaagtggatatgtggtcctctttgaagatgtctttggaaacgggaatatcttcacataaaaactaaacagaagcattctcagaaacttctctgtgatgtttgtgttcaactcacagagtttcacgttgcttttcatagagcagatgagaaacatgcttttcgtagggtctgcaagtggacatttggagagatttccggcctgtggtggaaaacgaattatcgtcacgtaaaaactagagagaagcattgtcagaaacttgtttgtgatgactgcattcaactcacagagttgaaggttccttttcaaacagcagtttccaaacactctttctgtggcatctgcaagtggatgtttgggcctctttgaagatttcgttggaaacgggataatcttcacagaaaagctaaacagaagcattctcagaaacttctttgtgatgtttgctttcaactcacagagttgaactttccttttgagagagaagctttgaaacactctttttctagaatctgcaagtggatatttgcagggctttgaggcctgtggtggaaaaggaattatcttcccgtaagaactagatagatgcattctcagaaactactttgtgacgattgcattcaagtcacggaggtgaacattccctttcagagagcactttggaaactctcgttgtgtagaatctgcaagtggagatatggaccgctttgaggcctatggtagtaaaggaaacaacttcatataaaaactagacagcagcattctcagaaaactctttgtgacgactgagtttaactcacagggctgaacattcctttggatggagcagtttggaaacacactatctgtaggatctgcaagcggatacttgggcctccctgaggatttcgttggaaacgggataaactgcacagaactaaacagaagcattctcagaaccttcttcgtgatgtttgcattcaacccacagtgttgaacctttctttgatagttcaggtttgaaacactctttttgtagaaactgcaagtggataactgcacttctttgaggcctatcgtagtaaaggaaataacttcctataaaaacaagacagaagctttctcagaaaattctctgggatgattgagttgaactcacagggcagtactttccttgggatggagtagtttcgaaacacactttctgtagaatctgcaagtggatatttggacctgtctgaggaattcgttgcaaacgggataatttcagctaagtaaacagaagcagtctcagaatcttcttgtgatgtttgcattcaaatcccagaattgaatcttcctttgaaagttcaggttggaaacactctttttgcaggatctacaagtggatattcggaccactctgtggacttcattcgaaacgggtatatcttcacataacatctagacagaagcattctcagaaacttttctgtgatgactgcattcaactcacagagttgaacactcctttcgagagcgcagttttgaaactctctttctctggaatctgcaaggggacatgcagacctctttgaaggtttcgttggaaacggaatcatcttcacataaaaattacacagaggcatcctcaggaactccttggtgatgtttgtattcaacttccagagttgaactttccttcggaaagagcagctatgaaacactctttttctagaatctgcaagtggacattgggagggctgtgaggtttgtggtggaaaaggaaatatctccacataaatactagatagaagccttctcagaaactactttgtgatgattgcattcacctcacggagtggagcattcctattgacagagcagtttggaaacactcttctcgtagaatcggctagtggagatttggagcgctttgaggcctatggtagtaaagggaagagcttcacatacaatctagacagaagcattctcagaaaatactttgtgatgattgagtttaacacacagagctgcacattcctttggatggagaaggtttgaaacacactttctgtagaatctgcgagtggatatttggacctctctgaggatttcgttggaaacgggataactgcacctaactaaacggaagcattctcacaaaattctttgtgatgattgcattcaaatcccagagttgaaccttcctttgatagttcatctttgaatcactctttttgtaggatctgcaagtggatatttggaccactctttggccttcgttcgtaaagggtacatcttcaaataaaatctagacagaagccttctcagaaacttctctgtgacgattgcattcaactcagagagttgaaccctcctatggatggagcagttttgaatctctctttttgtggaatctgcaagtggatatgtggtcctctttgaagatgtctttggaaacgggaatatcttcacataaaaactaaacagaagcattctcagaaacttctctgtgatgtttgtgttcaactcacagagcttcacgttgcttttcatagagcagatgagaaacatgcttttcatagggtctgcaagtggacatttggagagctttcaggcctgtggtggaaaacgaattatcgtcacgtaaaaactagagagaagcattgtcagaaacttgtttgtgatgactgcattcaactcacagagttgaaggttccttttcaaacagcagtttccaaacactctttctgtggcatctgcaagtggatgtttgggcctctttgaagatttcgttggaaacgggataatcttcacagaaaagctaaacagaagcattctcagaaacttctttgtgatgtttgctttcaactcacagagttgaactttccttttgagagagaagctttgaaacactctttttctagaatctgcaagtgaatatttggagggctttgaggcctgaggtggaaaaggaattatcttcccgtaagaactagatagatgcattctcagaaactactttgtgacgattgcattcaagtcacagaggtgaacattccctttcagagagcactttggaaactctcgttgtgtagaatctgcaagtggagatatggaccgctttgaggcctatggtagtaaaggaaacagcttcatataaaaactagacagcagcattctcagaaaactctttgtgacgactgagtttaactcacagggctgaacattcctttggatggagcagtttggaaacacactatctgtaggatctgcaagcggatacttgggcctctctgaggatttcgttggaaacggaataaaccgcacagaactaaacagaagcattctcagaaccttcttcgtgatgtttgcattcaacccacagtgttgaacctttctttgatagttcaggtttgaaacactctttttgtagaaactgcaagtggataactgcacttctttgaggcctatcgtaataaaggaaataacttcctataaaaacaagacagaagctttctcagaaaattctctgggatgattgagttgaactcacagagcagtactttccttgggatggagtagtttcgaaacacactttctgtagaatctgcaagtggatatttggacctgtctgaggaattcgttgcaaacgggataatttcagctaagtaaacagaagcagtctcagaatcttcttgtgatgtttgcattcaaatcccagaattgaaccttcctttgaaagttcaggtttgaaacactctttttgcaggatctacaagtggatattcggaccactctgtggacttcgttcgaaacgggtatatcttcacataacatctagacagaagcattctcagaaacttttctgtgatgactgcattcaactcacagagttgaacactccttttgagagcacagttttgaaactctctttctctggaatctgcaaggggacatgcagacctctttgaaggtttcgttggaaacggaatcatcttcacataaaaattacacagaggcatcctcaggaactccttggtgatgtttgtattcaacttccagagttgaactttccttcggaaagagcagctatgaaacactctttttctagaatctgcaagtggacattgggagggctgtgaggtttgtggtggaaaaggaaatatctccacataaatactagatagaagccttctcagaaactactttgtgatgattgcattcacctcacggagtggagcattcctattgacagagcagtttggaaacactcttctcgtagaatcggctagtggagatttggagcgctttgaggcctatggtagtaaagggaagagcttcacataaaatctagacagaagcattctcagaaaacactttgtgatgattgagtttaacacacagagctgaacattcctttggatggagaaggtttgaaacacactttctgtagaatctgcgagtggatatttggacgtctctgaggatttcgttggaaacgggataactgcacctaactaaacggaagcgttctcacaaaattctttgtgatgtttgcattcaaatcccagagttgaaccttcctttgatagttcagctttgaaacactctttttgtaggatctgcaggtggatatttggaccactctttggccttcgttcgaaacgggtacatcttcaaataaaatctagacagaagccttctcagaaacttctctgtgacgattgcattcaacccaaagagttgaaccctcctatggatagagcagttttgaatctctctttttgtggaatctgcaagtggatatgtggtcctctttgaagatgtctttggaaacgggaatatcttcacataaaaactaaacagaagcattctcagaaacttctctgtgatgtttgtgttcaactcacagagtttcacgttgcttttcatagagcagatgagaaacatgcttctcgtagggtctgcaagtggacatttggagagatttcaggcctgtggtggaaaacgaattatcgtcacgtaaaaacgagagagaagcattgtcagaaacttgtttgtgatgactgcattccactcacagagttgaaggttcctttccaaacagcagtttccaaacactctttctgtggcatctgcaagtggatgtttgggcctctttgaagatttcgttggaaacgggataatcttcacagaaaagctaaacagaagcatgctcagaaacttctttgtgatgtttgctttcaactcacagagttgaactttccttttgagagagaagctttgaaacactctttttctagaatctgcaagtggatatttggagggctttgaggcctgaggtggaacaggaattatcttcccgtaagaactagatagatgcattctcagaaactactttgtgacgattgcattcaagtcacagaggtgaacattccctttcagagagcactttggaaactctcgttgtgtagaatctgcaagtggagatatggaccgctttgaggcctatggtagtaaaggaaacagcttcatataaaaactagacagcagcattctcagaaaactctttgtgacgactgagtttaactcacagggctgaacattcctttggatggagcagtttggaaacacactatctgtaggatctgcaagcggatacttgggcctctctgaggatttcgttggaaacgggataaaccgcacagaactaaacagaagcattctcagaaccttcttcgtgatgtttgcattcaacccacagtgttgaacctttctttgatagttcaggtttgaaacactctttttgtagaaactgcaagtggataactgcacttctttgaggcctatcgtagtaaaggaaataacttcctataaaaacaagacagaagctttctcagaaaattctctgcgatgattgagttgaactcacagagcagtactttcgttgggatggagtagtttcgaaacacactttctgtagaatctgcaagtggatatttggacctgtctgaggaattcgttgcaaacgggataatttcagctaagtaaacagaatcagtctcagaatcttcttgtgatgtttgcattcaaatcccagaattgaaccttcctttgaaagttcaggttggaaacactctttttgcaggatctacaagtggatattcggaccactctgtggacttcgttcgaaacgggtatatcttcacataacatctagacagaagcattctcagaaacttttctgtgatgactgcattcaactcacagagttgaacactccttttgagagcgcagttttgcaactctctttctctggaatctgcaaggggacatgcagacctctttgaaggtttcgttggaaacggaatcatcttcacataaaaattacacggaagcatcctcaggaactccttggtgatgtttttattcaacttccagagttgaactttccttcggaaagagcagctatgaaacactctttttctagaatctgcaagtggacattgggagggctgtgaggtttgtggtggaaaaggaaatatctccacataaatactagatagaagccttctcagaaaactactttgtgatgattgcattcacctcacgggagtggagcattcctattgacagagcagtttggaaacactcttcttgtagaatcggctagtggagatttggagcgctttgaggcctatggtagtaaagggaagagcttcacataaaatctagacagaagcattctcagaaaatactttgtgatgattgagtttaacacacagagctgaacattcctttggatggagaaggtttgaaacacactttctgtagaatctgcgagtggatatttggacctctctgaggatttcgttggaaacgggataactgcacctaactaaacggaagcattctcacaaaattctttgtgatgtttgcattcaaatcccagagttgaaccttcctttgatagttcagctttgaaacactctttttgtaggttctgcaggtggatatttggaccactctttggccttcgttcgaaacgggtacatcttcaaataaaatctagacagaagccttctcagaaacttctctgtgacgattgcattcaactcacagcgttgcaccctcctatggatagagcagttttgaatctctctttttgtggaatctgcaagtggatatgtggtcctctttgaagatgtctttggaaacgggaatatcttcaaataaaaactaaacagaagcattctcagaaacttctctgtgatgtttgtgttcaactcacagagtttcacgttgcttttcatacagcagatgagaaacatgcttttcgtagggtctgcaagtggacatttggagagatttcaggcctgtggtggaaaacgaattatcgtcacgtaaaaactagagagaagcattgtcagaaacttgtttgtgatgattgcattcaactcacagagttgaaggttccctttcaaacagcagtttccaaacacactttctgtggaatctgcaattggatagttggacctctttgaagatgtctttggaaacgggataatcttcacagaaaagctaaacagaagcattgtcagaaacttctttgtgatgtttgcattctactcacagagttgaactttccttttgagagagaagctttgaaacactctttctctagaatctgcaagtggatatttggagggctttgaggcctgtggtggaaaaggaattaacttcccgtaaaaactagatagatgcattctcagaaactactttgtgacgattgcattcaagtcacagaggtgaacattccctttcagagagcactttggaaactctcgttgtgtagaatctgcaagtggagatatggaccgcttagaggcctatgctagtaaaggaaacagcttcatataaaaactagacagcagcattctcagaaaactctttgtgacgactgagtttaactcacagggctgaacattcctttggatggagcagtttggaaacacactatctgtaggatctgcaagcggatacttgggcctccctgaggatttcgttggaaacgggataaactgcacagaactaaacagaagcattctcagaaccttcttcgtgatgtttgcattcaacccacagtgttgaacctttctttgatagttcaggtttgaaacactctttttgtagaaactgcaagtggataactgcacttctttgaggcctatcgtagtaaaggaaataacttcctataaaaacaagacagaagctttctcagaaaattctctgggatgattgagttgaactcacagagcagtactttccttgggatggagtagtttcgaaacacactttctgtagaatctgcaagtggatatttggacctgtctgaggaattcgttgcaaacgggataatttcagctaagtaaacagaagcagtctcagaatcttcttgtgatgtttgcattcaaatcccagaatgaaaccttcctttgaaagttcaggttggaaacactctttttgcaggatctacaagtggatattcggaccactctgtggacttcgttcgaaacgggtatatcttcacataacatctagacagaagcattctcagtaaacttttctgtgatgactgcattcaactcacagagttgaacactccttttgagagcgcagttttgaaactctctttctctggaatctgcaaggggacatgcagacctctttgaaggtttcgttggaaacggaatcatcttcacataaaaattacacggaagcctcctcaggaactccttggtgatgtttgtattcaacttccagagttgaactttccttcggaaagagcagctatgaaacactctttttctagaatctgcaagtggacattgggagggctgtgaggtttgtggtggaaaaggaaatatctccacataaatactagatagaacccttctcagaaactactttgtgatgattgcattcacctcacggagtggagcattcctattgacagagcaggttggaaacactcttgttgtagaatctgctagtggagatttggagcgctttgaggcctatggtagtaaagggaagagcttcacataaaatctagacagaagcattctcagaaaatactttgtgatgattgagtttaacacacagagctgaacattcctttggatggagaaggtttgaaacacactttctgtagaatctgcgagtggatatttggacctctctgaggttttcgttggaaacgggataactgcacctaactaaacggaagcattctcacaaaattcttcgtgatgtttgcattcaaatcccagagttgaaccttcctttgatagttcagctttgaaacactctttttgtaggatctgcaagtggatatttggaccacactttggccttccttcgaaacgggtacatcttcatataaaatctagacagaagccttctcagaaacttctctgtgacgattgcattcaactcaaagagttgaaccctcctatggatagagcagtttttaatctctctttttgtggaatctgcaagtggatatgtggtcctctttgaagatgtctttggaaacgggaatatcttcacataaaaactaaacagaagcattctcagaaacttctctgtgatgtttgtgttcaactcacagagtatcacgttgcttttcatagagcagatgagaaacatgcttttcgttgggtctgcaagtggacatttggagagctttcaggcctgtggtggaaaacgaattatcgtcacgttaaaaactagagagaagcattgtcagaaacttgtttgtgatgactgcattcaactcacagagttgaaggttccttttcaaacagcagtttccaaacactctttctgtggcatctgcaagtggatgtttgggcctctttgaagatttcgttggaaacgggataatcttcacagaaaagctaaacagaagcattctcagaaacttctttgtgatgtttgctttcaactcacagagttgaactttccttttgagagagaagctttgaaacactctttttctagaatctgcaagtggatatttggagggctttgaggcctgaggtggaaaaggaattatcttcccgtaagaactagatagatgcattctcagaaactactttgtgacgattgcattcaagtcacagaggtgaacattccctttcacagagcactttggaaactctcgttgtgtagaatctgcaagtggagatatggaccgctttgaggcctatggtagtaaaggaaacagcttcatataaaaactagacagcagcattctcagaaaactctttgtgacgactgagtttaactcacagggctgaacattcctttggatggagcagtttggaaacacactatctgtaggatctgcaagcggatacttgggcccctctgaggatttcgttggaaacgggataaaccgcacagaactaaacagaagcattctcagaaccttcttcgtgatgtttgcattcaacccacagtgttgaacctttctttgatagttcaggtttgaaacactctttttgtagaaactgcaagtggataactgcacttctttgaggcctatcgtagtaaaggaaataacttcctataaaaacaagacagaagctttctcagaaaattctctgggatgattgagttgaactcacagagcagtactttctttgggatggagtagtttcgaaacacactttctgtacaatctgcaagtggatatttggacctgtctgaggaattcgttgcaaacgggataatttcagctaattaacagaagcagtctcagaatcttcttgtgatgtttgcattcaaatcccagaattgaacattcctttgaaagttcaggttggaaacactctttttgcaggatctacaagtggatattcggaccactctgtggacttcgttcgaaacgggtatatcttcacataacatctagacagaagcattctcagaaacttttctgtgatgactgcattcaactcacagagttgaacactccttttgagagcgcagttttgaaactctctttctctggaatctgcaaggggacatgcagacctctttgaaggtttcgttggaaacggaatcatcttcacataaaaattacacggaagcatcctcaggaactccttggtgatgtttgtattcaacttccagagttgaactttccttcggaacgagcagctatgaaacactctttttctagaatctgcaagtggacattgggagggctgtgaggtttgtggtggaaaaggaaatatctccacataaatactagatagaagccttctcagaaactactttgtgatgattgcattcacctcacggagtggagcattcctattgacagagcagtttggaaacacccttgttgtagaatctgctagtggagatttggagcgctttgaggcctatggtagtaaagggaagagcttcacataaaatgtagacagaagcattctcagaaaatactttgtgatgattgagtttaacacacagagctgaacattcctttggatggagaaggtttgaaacacactttctgtagaatctgcgagtggatatttggacctctctgaggatttcgttggaaacgggataactgcacctaactaaacggaagcattctcacaaaattctttgtgatgtttgcattcaaatcccagagttgaaccttcctttgatagttcagctttgaaacactctttttgtaggatctgcaggtggatatttggaccactctttggccttcgttcgaaacgggtacatcttcaaataaaatctagacagaagccttctcagaaacttctctgtgacgattgcattcaactcaaagcgttgaaccctcctatggatagagcagttttgaatctctctttttgtggaatctgcaagtggatatgtggtcctctttgaaggtgtctttggaaacgggaatatcttcacataaaaactaaacagaagcattctcagaaacttctctgtgatgtttgtgttcaactcacagagtttcacgttgcttttcatagagcagatgagaaacatgcttttcgtagggtctgcaagtggacatttggagagctttcaggcctgtggtggaaaacgaattatcgtcacgtaaaaactagagagaagcattgtcagaaacttgtttgtgatgactgcattcaactcacagagttgaaggttcctttccaaacagcagtttccaaacactctttctgtggcatctgcaagtggatgtttgggcctctttgaagatttcgttggaaacgggatactcttcacagaaaagctaaacagaagcattctcagaaacttctttgtgatgtttgctttcaactcacagagttgaactttccttttgagagagaagctttgaaacactctttttctagaatctgcaagtggatatttggagggctttgaggcctgtggtggaaaacgaattatcttcccgtaagaactagatagatgcattctcagaaactactttgtgacgattgcattcaagtcacagaggtgaacattccctttcagagagcactttggaaactctcgttgtgtagaatctgcaagtggagatatggaccgctttgaggcctatggtagtaaaggaaacagcttcatataaaaactagacagcagcattctcagaaaactctttgtgacgactgagtttaactcacagggctgaacattcctttggatggagcagtttggaaacacactatctgtaggatctgcaagcggattcttgggcctccctgaggatttcgttggaaacgggataaaccgcacagaactaaacagaagcattctcagaaccttcttcgtgatgtttgcattcaacccacagtgttgaacctttctttgatagttcaggtttgaaacactctttttgtagaaactgcaagtggataactgcacttctttgaggcctatcgtagtaaaggaaataacttcctataaaaacaagacagaagctttctcagaaaattctctgggatgattgagttgaactcacagagcagtactttccttgggatggagtagtttcgaaacacactttctgtagaatctgcaagtgggtatttggacctgtctgaggaattcgttgcaaacgggataatttcagctaagtaaacagaagagcagtctcagaatcttcttgtgatgtttgcattcaaatcccagaattgaaccttcctttgaaagttcaggttggaaacactctttttgcaggatctacaagtggatattcggaccactctgtggacttcgttcgaaacgggtatatcttcacataacatctagacagaagcattctcagaaacttttctgtgatgactgcattcaactcacagagtggaacactccttttgagagcgcagtttggaaactctctttctctggaatctgcaaggggacatgcagacctctttgaaggtttcgttggaaacggaatcatcttcacataaaaattacacagaagcattctcaggaactccttggtgatgtttgtattcaatttccagagttgaactttccttcggaaagagcagctatgaaacactccttttatagaatctgcaagtggacattgggagggctgtgaggtttgtggtggaaaagaaatatctccacgtaaatactagatagaagccttctcagaaactactttgtgatgattgcattcacctcacggagtggagcattcctattgacagagcagtttggaaacactcttgttgtagaatctgctagtggagatttggtgcgctttgaggcctatggtagtaaagggaagagcttcacataaaatctagacagaagcattctcagaaaatactttgtgatgattgagtttaacacacagagctgaacattcctttggatggagcaggtttgaaacacactttctgtagaatctgcgagtggatatttggacctctctgaggatttcgttggaaacgggattactgcacctaactaaacggaagcattctcacaaaattctttgtgatgtttgcattcaaatcccagagttgaaccttcctttgatagttcagctttgaaacactctttttgtaggatctgcaggtggatatttggaccactctttggccttcgttcgaaacgggtacatcttcaaataaaatctagacagaagccttctcagaaacttctctgtgatgattgcattcaactcaaagtgttgaaccctcctatggatagagcagttttgaatctctctttttgtggaatctgcaagtggatatgtggtcctctttgaagatgtctttggaaacgggaatatcttcacataaaaactaaacagaagcattctcagaaacttctctgtgatgtttgtgttcaaatcacagagtttcacgttgcttttcatagagcagatgagaaacatgcttttcgtagggtctgcaagtggacatttggagagatttcaagcctgtggtggaaaacgaattatcgtcacgtaaaaactagagggaagcattgtcagaaacttgtttgtgatgactgcattcaactcacagagttgaaggttccttttcaaacagcagtttccaaacactctttctgtggcatctgcaagtggatgtttgggcctctttgaagatttcgttggaaaagggataatcttcacagaaaagctaaacagaagcattctcagaaacttctttgtgatgtttgctttcaactcacagagttgaactttccttttgagagagaagctttgaaacactctttttctagaatctgcaagtggatatttggagggctttgaggcctgtggtggaaaaggaattatcttcccgtaagaactagatagatgcattctcagaaactactttgtgacgattgcattcaagtcacagaggtgaacattccctttcagagagcactttggaaactctcgttgtgtagaatctgcaagtggagatatggaccgctttgaggcctatggtagtaaaggaaacagcttcatataaaaactagacagcagcattctcagaaaactctttgtgacgactgagttaaactcacagggctgaacattcctttggatggagcagtttggaaacacactatctgtaggatctgcaagcggatacttgggcctccctgaggatttcgtgggaaacgggataaaccgcacagaactaaacagaagcattctcagaaccttcttcgtgatgtttgcattcaacccacagtgttgaacctttctttgatagttcaggtttgaaacactcttttagtagaaactgcaagtggataactgcacttctttgaggcctatcgtagtaaaggaaataacttcctataaaaacaagacagaaagctttctcagaaaattctctgggatgattgagttgaactcacagagcagtactttccttgggatggagtagtttcaaaacacactttctgtagaatctgcaagtggatatttggacctgtatgaggaattcgttgcaaacaggataatttcagctaagtaaacagaagcagtctcagaatcttcctgtgatggttgcattcaaatcccagaattgaaccttcctttgaaagttcaggttggaaacactctttttgcaggatctacaagtggatattcggaccactctgtggacttcgttcgaaacgggtatatcttcacataacatctagacagaagcattctcagaaacttttctgtgatgactgcattcaactcacagagttgaacactccttttgagagcgcagttttgaaactctctttctctggaatctgcaaggggacatgcagacctctttgaaggtttcgttggaaacggaatcatcttcacataaaaattacacagaagcatcctcaggaactccttggtgatgtttgtattcaacttccagagttgaactttccttcagaaagagcagctatgaaacactctttttctagaatctgcaagtggacattgggagggctgtgaggtttgtggtggaaaaggaaatatctccacataaatactagatagaagccttctcagaaactactttgtgatgactgcattcacctcacggagtggagcattcctattgacagagcagtttggaaacactcttcttgtagaatcggctagtggagagttggagcgctttgaggcctatggtagtaaagggaagagcttcacataaaatctagacagaagcattctcagaaaatactttgtgatgattgagtttaacacacagagctgaacattactttggatggagcaggtttgaaacacactttctgtagaatctgcgagtggatatttggacctctctgaggatttcgatggaaacgggataactgcacctaactaaacggaagcattctcacaaaattctttgtgatgtttgcattcaaatcccagagttgaaccttcctttgatagttcagctttgaaacactctttttgtaggatctgcaggtggatatttggaccactctttggccttcgttcgaaacgggtacatcttcaaataaaatctagacagaagccttctcagaaacttctctgtgatgattgcattcaactcaaagcgttgaaccctcctatggatagagcagttttgaatctctctttttgtggaatctgcaagtggttgtgtggtcctctttgaaaatgtctttggaaacgggaatatcttcacataaaaactaaacagaagcattctcagaaacttctctgtgatgtttgtgtccaaatcacagagtttcacgatgcttttcatagagcagatgagaaacattcttttcgtagggtctgcaagtggacatttggagagatttcaggcctgtggtggaaaacgaataatcgtcaagtaaaaactagagggaagcattgtcagaaacttgtttgtgatgactgcattcaactcacagagttgaaggttccttttcaaacagcagtttccaaacactctttctgtggcatctgcaagtggatgtttgggcctctttgaagatttcgttggaaacgggataatcttcacagaaaagctaaacagaagcattctcagaaacttctttgtgatgtttgctttcaactcacagagttgaactttccttttgagagagaagctttgaaacactctttttctagaatctgcaagtggatatttggagggctttgaggcctgtggtggaaaacgaattatcttcccgtaagaactagatagatgcattctcagaaactactttgtgacgattgcattcaagtcacagaggtgaacattccctttcagagagcactttggaaactctcgttgtgtagaatctgcaagtggagatatggaccgctttgaggcctatggtagtaaaggaaacagcttcatataaaaactagacagcagcattctcagaaaactctttgtgacgactgagtttaactcacagggctgaacattcctttggatggagcagtttggaaacacactatctgtaggatctgcaagcggatacttgggcctccctgaggatttcgttggaaacggtataaaccgcacagaactaaacagaagcattctcagaaccttcttcgtgatgtttgcattcaacccacagtgttgaacctttctttgctagttcaggtttgaaacactctttttgtagaaactgcaagtggataactgcacttctttgaggcctatcgtagtaaaggaaataacttcctataaaaacaagacagaagctttctcagaaaattctctgggatgattgagttgaactcacagagcagtactttccttgggatggagtagtttcaaaacacactttctgtagaatctgcaagtggatatttggacctgtctgaggaattcgttgcaaacgggataatttcagctaagtaaacagaagcagtctcagaatcttcttgtgatgtttgcattcaaatcccagaatggaaccttcctttgaaagttcaggttggaaacactctttttgcaggatctacaagtggatattcggaccactctgtggacttcgttcgaaacgggtatatcttcacataacatctagacagaagcattctcagaaacttttctgtgatgactgcattcaactcacagagttgaacactccttttgagagtgcagttttgaaactctctttctctggaatctgcaaggggacatgcagacctctttgaaggtttcgttggaaacggaatcatcttcacataaaaattacacagaagcatcctcaggaactccttggtgatgtttgtattcaacttccagagttgaactttccttcggaaagagcagctataaaacacactttttctaaaatctgcaagtggacattgggagggctgtgaggtttgtggtggaaaaggaaatatctccacataaatactagatagaagccttctcagaaactactttgtgatgactgcattcacctcacggagttgagcattcctattgacagagcagtttggaaacactcttcttgtagaatcggctagtggagatttggagcgctttgaggcctatggtagtaaagggaagagcttcacataaaatctagacagaagcattctcagaaaatactttgtgatgattgagtttaacacacagagctgaacattcctttggatggagaaggtttgaaacacactttctgtagaatctgcgagtggatatttggacctctctgaggatttcgttggaaacgggataactgcacctaactaaacggaagcattctcacaaaattctttgtgatgtttgcattcaaatcccagagttgaaccttcctttgatagttcagctttgaaacactctttctgtaggttctgcaggtggatatttggaccactctttggccttcgttcgaaacgggtacatcttcaaataaaatctagacagaagccttctcagaaacttctctgtgacgattgcattcaactcacagcgttgaaccctcctatggatagagcagttttgaatctctctttttgtggaatctgcaagtggatatgtggtcctctttgaagatgtctttggaaacgggaatatcttcacataaaaactaaacagaagcattctcagaaacttctctgtgatgtttgtgttcaactcacagagtttcacgttgcttttcatagagcagatgagaaacatgcttttcgtagggtctgcaagtggacatttggagagatttcaggcctgtggtggaaaacgaattatcgtcacgtaaaaactagagagaagcattgtcagaaacttgtttgtgatgactgcattcaactcacagagttgaaggttccttttcaaacagcagtttccaaacactctttctgtggcatctgcaagtggatgtttgggcctctttgaagatttcgttggaaacgggataatcttcacagaaaagctaaacagaagcattctcagaaacttctttgtgatgtttgctttcaactcacagagttgaactttccttttgagagagaagctttgaaacactctttttctagaatctgcaagaggatatttggagggctttgaggcctgaggtggaaaaggaattatcttcccgtaagaactagatagatgcattctcagaaactactttgtgacgattgcattctagtcacagaggtgaacattccctttcacagagcactttggaaactctcgttgtgtagaatctgcaagtggagatatggaccgctttgaggcctatggtagtaaaggaaacagcttcatataaaaactagacagcagcattctcagaaaactctttgtgacgactgagtttaactcacagggctgaacattcctttggatggagcagtttggaaacacactatctgtaggatctgcaagcggatatttgggcctccctgaggatttcgttggaaacgggataaaccgcaccgaactaaacagaagcattctcagaaccttcttcgtgatgtttgcattcaacccacagtgttgaacctttctttgatagttcaggtttgaaacactctttttgtagaaactgcaagtggataactgcacttctttgaggcctatcgtagtaaaggaaataacttcctataaaaacaagacagaagctttctcagaaaaacctctgggatgattgagttgaactcacagagctgtactttccttgggatggagtagtttcgaaacacactttctgtagaatctgcaagtggatatttggacctgtctgaggaattcgttggaaacgggataacttcagctaactaaacagaagcaatctcagaatcttctttgtgatgtttgcattcaaatcccagagttgaaccttcctttgaaagttcaggtttgaaaccctctttttgcaggatctaccaatttattttgggaccactctgtggtcttcgttcgaaacgggtatatcttcacataacatctagacagaagcattctcagaaacttttctgtgatgactccattcaactcactgagttgaacactccttttgagagcgcagttttgaaactctctttctctggaatctgcaaggggacatgcagacctctttgaaggtttcgttggaaacggaatcatcttcacataaaaattacacagaagcaccctcaggaactccttggtgatgtttgtattcaacttccagagttgaactttccttcggaaagagcagctatgaaacactctttttctagaatctgaaagtggacattgggagggctgtgaggtttgtggtggaaaaggaaatatctccacataaatactagatagaagccttctcagaaactactttgtgatgattgcattcacctcacggagttgagcatccctattgacagagcagtttggaaacactcttgttgtacaataggctagtggagatttggagcgctttgaggcctatggtagtaaagggaagagcttcacataaaatctagacagaagcattctcagaaaatactttgtgatgattgagtttaacacacagagctgaacattcctttggatggagaaggtttgaaacacactttctgtagaatctgcgagtggatatttggacctctctgaggatttcgttggaaacgggataactgcacctaactaaacggaagcattctcacaaaattctttgtgatgtttgcattcaaatcccagagttgaaccttcctttgatagttcagctttgaaacactctttttgtaggctctgcaggtggatatttggaccactctttggccttcgttcgaaaagggtacatcttcaaataaaatctagacagaagccttctcagaaacttctctgtgacgattgcattcaactcaaagcgttgaaccctcctatggatagagcagttttgaatctctctttttgtggaatctgcaagtggatatgtggtcctctttgaagatgtctttggaaacgggaatatcttcacataaaaactaaacagaagcattctcagaaacttctctgtgatgtttgtgttcaactcacagagtttcacgttgcttttcatagagcagatgagaaacatgcttttcgtagggtctgcaagtggacatttggagagctttcaggcctgtggtggaaaatgaattatcgtcacgtaaaaactagagagaagcattgtcagaaacttgtttgtgatgactgcattcaactcacagagttgaaggttccttttcaaacagcagtttccaaacactctttctgtggcatctgcaagtggatgtttgggcctctttgaagatttcgttggaaacgggataatcttcacagaaaagctaaacagaagcattctcagaaacttctttgtgatgtttgctttcaactcacagagttgaactttccttttgagagagaagctttgaaacactctttttctagaatctgcaagtggatatttggagggctttgaggcctgaggtggaaaaggaattatcttcccgtaagaactagatagatgcattctcagaaactactttgtgacgattgcattcaagtcacagaggtgaacattccctttcacagagcactttggaaactctcgttgtgtagaatctgcaagtggagatatggaccgctttgaggcctatggtagtaaaggaaacagcttcatataaaaactagacagcagcattctcagaaaactctttgtgacgactgagtttaactcacagggctgaacattcctttggatggagcagtttggaaacacactatctgtaggatctgcaagcggatacttgggcctccctgaggatttcgtgggaaacgggataaaccgcacagaactaaacagaagcattctcagaaccttcttcgtgatgtttgcattcaacccacagtgttgaacctttctttgatagttcagctttgaaacactctttttgtagaaactgcaagtggataactgcacttctttgaggcctatcgtagtaaaggaaataacttcctataaaaacaagacagaagctttctcagaaaattctctgggatgattgagttgaactcacagagcagtactttccttgggatggagtagtttcgaaacacactttctgtagaatctgcaagtggatatttggacctgtctgaggaattcgttgcaaacgggataatttcagctaagtaaacagaagcagtctcagaatcttcttgtgatgtttgcattcaaatcccagaattgaaccttcctttgaaagttcaggttggaaacactctttttgcaggatctacaagtggatattcggaccactctgtggacttccttcgaaacgggtatatcttcacataacatctagacagaagcattctcagaaacttttctgtgatgactgcattcaactcacagagttgaacactccttttgagagtgcagttttgaaactctctttctctggaatctgcaaggggacatgcagacctctttgaaggtttcgttggaaacggaatcatcttcacataaaaattacacagaggcatcctcaggtaactccttggtgatgtttgtattcaacttccagagttgaactttccttcggaaagagcagctatgaaacactctctttctagaatctgcaagtggacattgggagggctgtgaggtttgtggtggaaaaggaaatatctccacataaatactagatagaagccttctcagaaactactttgtgatgattgcattcacctcacggagtggagcattcctattgacagagcagtttggaaacactcttcttgtagaatcggctagtggagatttggagcgctttgaggcctatggtagtaaagggaagagcttcacataaaatctagacagaaacattctcagaaaatactttgtgatgattgagtttaacacacagagctgaacattcctttggatggagaatgtttgaaacacactttctgtagaatctgcgagtggatatttggacctctctgaggattttgttggaaacgggataactgcacctaattaaaggaagcattctcacaaaattctttgtgatgtttgcattcaaatcccagagttgaaccttcctttgatagttcagctttgaaacactctttttgtaggatctgcaggtggatatttggaccactctttggccttcgttcaaaacgggtacatcttcaaataaaatctagacagaagccttctcagaaacttctctgtgatgattgaattcaactcaaggcgttgaaccctcctatggatagggcagttttgaatctctctttttgtggaatctgcaagtggatatgtggtcctctttgaagatgtctttggaaacgggaatatcttcacataaaaactaaacagaagcattctcagaaacttctctgtgatgtttgtgttcaactcacagagtttcacgttgcttttcatagagcagatgagaaacatgcttttcgtagggtctgcaagtggacatttggagagatttcaggcctgtggtggaaaacgaattatcgtcacgtaaaaactagagagaagcattgtcagaaacttgtttgtgatgactgcattcaactcacagagttgcaggttccttttcaaacagtagtttccaaacactctttctgtggcatctgcaagtggatgtttgggcctctttgaagatttcgttggaaacgggataatcttcacagaaaagctaaacagaagcattgtcagaaacttctttgtgatgtttgctttcaactcacagagttgaactttccttttgagagagaagctttgaaacactctttttctagaatctgcaagtggatatttggagggctttgaggcctgtggtggaaaacgaattatcttcccgtaagaactagatagatgcattctcagaaactactttgtgacgattgcattcaagtcacagaggtgaacattccctttcagagagcactttggaaactctcgttgtgtagaatctgcaagtggagatatggaccgctttgaggcctatggtagtaaaggaaacagcttcatataaaaactagacagcaagaattctcagaaaactctttgtgacgactgagtttaactcacagggctgaacattcctttggatggagcagtttggaaacacactatctgtaggatctgcaagcggatacttgggcctctctgaggatttcgttggaaacgggataaaccgcacagaactaaacagaagcattctcagaaccttcttcgtgatgtttgcattcaacccacagtgttgaacctttctttgatagttcaggtttgaaacactctttttgtagaaactgcaagtggataactgcacttctttgaggcctatcgtagtaaaggaaataacttcctataaaaacaagacagaagctttctcagaaaattctctgggatgattgagttgaactcacagagcagtacttttccttgggatggagtagtttcgaaacacactttctgtagaatctgcaagtggatatttggacctgtctgaggaattcgttgcaaacgggataatttcagctaagtaaacagaagcagtctcagaatcttcttgtgatggttgcattcaaatcccagaatggaaccttcctttgaaagttcaggttggaaacactctttttgcaggatctacaagtggatattcggaccactctgtggacttcgctcgaaacgggtatatcttcacataacatctagacagaagcattctcagaaacttttctgtgatgactgcattcaactcacagagttgaacactccttttgagagcgcagttttgaaactctctttctctggaatctgcaaggggacatgcagacctctttgaaggtttcgttggaaacggaatcatcttcacataaaaattacacagatgcatcctcaggaactccttggtgatgtttgtattcaacttccagagttgaactttccttcggaaagagcagctatgaaacactctttttctagaatctgcaagtggacattgggagggctgtgaggtttgtggtggaaaaggaaatatctccacataaatactagatagaagccttctcagaaactactttgtgatgattgcattcacctcacggagtggagcattcctattgacagagcagtttggaaacactctacttgtagaatcggctagtggagatttggagcgctttgaggcctatggtagtaaagggaagagcttcacataaaatctagacagaagcattctcagaaaatactttgtgatgattgagtttaacacacagagctgaacattcctttggatggagaaggtttgaaacacactttctgtagaatctgcgagtggatatttggacctctctgaggatttcgttggaaacgggataactgcacctaactaaacggaagcattctcacaaaattctttgtgatgtttgcattcaaatcccagagttgaaccttcctttgatagttcagctttgaaacactctttttgtaggatctgcaggtggatatttagaccactctttggccttcgttcgaaacgggtacatcttcaaataaaatctagacagaagccttctcagaaacttctctgtgacgattgcattcaactcaaagcgttgaaccctcctatggatagagcagttttgaatctctctttttctggaatctgcaagtggatatgtggtcctctttgaagatgtctttggaaacgggaatatcttcacataaaaactaaacagaagcattctcagaaacttctctgtgatgtttgtgttcaactcacagagtttcacgttgcttttcatagagcagatgagaaacatgcttttcgtagggtctgcaagtggacatttggagagatttccggcctgtggtggaaaacgaattatcgtcacgtaaaaactagagagaagcattgtcagaaacttgtttgtgatgactgcattcaactcacagagttgaaggttccttttcaaacaccagtttccaaacactctttctgtggcatctgtaagtggatgtttgggcctctttgaagatttcgttggaaacgggataatcttcacagaaaagctaaacagaagcattctcagaaacttctttgtgatgtttgctttcaactcacagagttgaactttccttttgagagagaagctttgaaacactctttttcaagaatctgcaagtggatatttggagggctttgaggcctgtggtggaaaaggaattatcttcccgtaagaactagatagatgcattctcagaaaatactttgtgacgattgcattcaagtcccagatgtgaacattccctttcacagagcactttggaaactctcgttgtgtagaatctgcaagtcgagatatggaccgctttgaggcctatggtagtaaaggaaacagcttcatataaaaactagacagcagcattctcagaaaactctttgtgacgactgagtttaactcacagggctgaacattcctttggatggagcagtttggaaacatactatctgtaggatctgcaagcggatacttgggcctccctgaggatttcgttggaaacgggataaaccgcacagaactaaacagaagcattctcagaaccttcttcgtgatgtttgcattcaacccacagtgttgaacctttctttgatagttcaggtttgaaacactcttttagtagaaactgcaagtggataactgcacttctttgaggcctatcgtagtaaaggaaataacttcctataaaaacaagacagaagctttctcagaaaattctctgggatcattgagttgaactcacagagcagtactttctttgggatggagtagtttcgaaacacactttctgtacaatctgcaagtggatatttggacctgtctgaggaattcgttgcaaacgggataatttcagctaagtaaacagaagcagtctcagaatcttcttgtgatgtttgcattcaaatcccagaattgaaccttcctttgaaagttcaggttggaaacactctttttgcaggatctacaagtggatattcggaccactctgtggacttcgttcgaaacggctatatcttcacataacatctagacagaagcattctcagaaacttttctgtgatgactgcattcaactcacagagttgaacactccttttgagagcgcagttttgaaactctctttctctggaatctgcaaggggacatgcagacctctttgaaggtttcgttggaaacggaatcatcttcacataaaaattacacagaagcattctcaggaactccttggtgatgtttgtattcaacttccagagttgaactttccttcggaaagagcagctatgaaacacactttctctagaatctgcaagtggacattgggagagctgtgaggtttgtggtggaaaaggaaatatctccacataaatactagatagaagccttctcagaaactactttgtgatgattgcattcacctcacggagtggagcattcctattgacagagcagtttggaaacactcttctcgtagaatcggctagcggagatttggagcgctttgaggcctatggtagtaaagggaagagcttcacataaaatctagacagaagcattctcagaaaatactttgtgatgattgagtttaacacacagagctgcacattcctttggatggagaaggtttgaaacacactttctgtagaatctgcgagtggatatttggacctctctgaggatttcgttggaaacgggataactgcacctaactaaacggaagcattctcacaaaattctttgtgatgtttgcattcaaatcccagagttgaaccttcctttgatagttcagctttgaaacactctttttgtaggatctgcaggtggatatttggaccactctttggccttcgttcgaaacgggtacatcttcaaataaaatctagacagaagccttctcagaaacttctctgtgacgattgcattcaactcacagcgttgaaccctcctatggatagagcaggtttgaatctctctttttgtggaatctgcaagtggatgtgtggtcctctttgaagatgtctttggaaacgggaatatcttcacataaaaactaaacagaagcattctcagaaacttctctgtgatgtttgtgttcaactcacagagtttcacgttcctgttcatagagcagatgagaaatatgcttttcgtagggtctgcaagtggacatttggagagatttcaggcctgtggtggaaaacgaattatcgtcacgtaaaaactagagagaagcattgtcagaaacttgtttgtgatgactgcattcaactcacagagttgaaggttccttttcaaacagcagtttccaaacactctttctgtggcatctgcaagtggatgtttgggcctctttgaagatttcgttggaaacgggataatcttcacagaaaagctaaacagaagcattctcagaaacttctttgtgatgtttgctttcaactcacagagttgaactttccttttgagagagaagctttgaaacactctttttctagaatctgcaagtggatatttggagggctttgaggcctgaggtggaaaaggaattatcttcccgtaagaactagatagatgcattctcagaaactactttgtgacgattgctttcaagtcacagaggtgaacattccctttcagagagcactttggaaactctcgttgtgtggaatctgcaagtggagatatggaccgctttgaggcctatggtagtaaaggaaacagcttcatataaaaactagacagcagcattctcagaaaactctttgtgacgactgagtttaactcacagggctgaacattcctttggatggagcagtttggaaacacactatctgtaggatctgcaagcggatacttgggcctccctgaggatttcgttggaaacgggataaaccgcacagaactaaacagaagcattctcagaaccttcttcgtgatgtttgcattcaacccacagtgttgaacctttctttgatagttcaggtttgaaacactctttttgtagaaactgcaagtggataactgcacttctttgaggcctatcatagtaaaggaaataacttcctgtaaaaacaagacagaagctttctcagaaaattctctgggatgattgagttgaactcacagggcagtactttccttgggatggagtagtttcgaaacacactttctgtagaatctgcaagtggatatttggtcctgtctgaggaattcgttgcaaacgggataatttcagctaagtaaacagaagcagtctcagaatcttcttgtgatgtttgcattcaaatcccagaattgaaccttcctttgaaagttcaggttggaaacactctttttgcaggatctacaagtggatattcggaccactctgtggacttcgtttgaaacgggtatatcttcacataacatctagacagaagcattctcagaaacttttctgtgatgactgcattcaactcacagagttgaacactccttttgagagcgcagttttgaaactctctttctctggaatctgcaaggggacatgcagacctctttgaaggtttcattggaaacggaatcatcttcacataaaaattacacagaagcatcctcaggaactccttggtgatgtttgtattcaacttccagagttgaactttccttcggaaagagcagctatgaaacactctttttctagaatctgcaagtggacattgggagggctgtgaggtttgtggtggaaaaggaaatatctccacataaatactagatagaagccttctcagaaactactttgtgatgactgcattcacctcacggagtggagcattcctattgacagagcagtttggaaacactcttcttgtagaatcggctagtggagagttggagcgctttgaggcctatggtagtaaagggaagagcttcacataaaatctagacagaaagcattctcagaaaatactttgtgatgattgagtttaacacacagagctgaacattcctttggatggagaaggtttgaaacacactttctgtagaatctgcgagtggatatttggacctctctgaggatttcgttggaaacgggataactgcacctaactaaacggaagcattctcacaaaattctttgtgatgtttgcattcaaatcccagagttgaaccttcctttgatagttcagctttgaaacactctttttgtaggttctgcaggtggatatttggaccactctttggccttcgttcgaaacgggtacatcttcaaataaaatctagacagaagccttctcagaaacttctctgtgacgattgcattcaactcaaagagttgaaccctcctatggatagagcagttttgaatctctctttttgtggaatctgcaagtggatatgtggtcctctttgaagatgtctttggaaacgggaatatcttcacataaaaactaaacagaagcattctcagaaacttctctgtgatgtttgtgttcaactcacagagtttcacgttgctattcatagagcagatgagaaacatgcttttcgtagggtctgcaagtggacatttcgagagatttccggcctgcggtggaaaacgaattatcgtcacgtaaaaactagagagaagcattgtcagaaacttgtttgtgatgactgcattcaactcacggagttgaaggttccttttcaaacagcagtttccaaacactctttctgtggcatctgcaagtggatgattgggcctctttgaagatttcgttggaaacgggataatcttcacagaaaagctaaacagaagcattctcagaaacttccttgtgatgtttgctttcaactcacagagttgaactttccttttgagagagaagctttgaaacactctttttctagaacctgcaagtggatatttggagggctttgaggcctgaggtggaaaaggaattatattcccgtaagaactagatagatgcattctcagaaactgctttgtgacgattgcattcaagtcacagaggtgaacattccctttcagagagcactttggaaactctcgttgtgtagaatctgcaagtggagatatggaccgctttgaggcctatggtagtaaaggaaacagcttcatataaaaactagacagcagcattctcagaaaactctttgtgacgactgagtttaactcacagggctgaacattcctttggatggagcagtttggaaacacaccatctgtaggatctgcaagcggatacttgggactctctgaggatttcgttggaaacgggataaaccacacagaactaaatagaagcattctcagatccttcttcgtgatgtttgcattcaacccacagtgttgaacctttccttgatagttcaggtttgaaacactctttttgtagaaactgcaagtggataactgcacttctttgaggcctatcgtagtaaaagaaataacttcctataaaaacaagacagaagctttctcagaaaattctctgggatgattgagttgaactcacagagcagtactttccttgggatggagtagtttcgaaacacactttctgtagaatctgcaagtggatatttggacctgtctgaggaattcgttgcaaacgggataatttcagctaagtaaacagaagcagtctcagaatcttcttgtgatgtttgcattcaaatcccagaattgaaccttcctttgaaagttcaggttggaaacactctttttgcaggatctacaagtggatattcggaccactctgtggacttcgttcgaaacggctatatcttcacataacatctagacagaagcattctcagaaacttttctgtgatgactgcattcaactcacagagttgaacactccttttgagagcgcagttttgaaactctctttctctggaatctgcaaggggacatgcagacctctttgaaggtttcgttggaaacggaatcatcttcacataaaaattacacagaagcatcctcaggaactccttggggatgtctgtattcaacttccagagttgaactttccttcggaaagagcagctatgaaacactctttttctagaatctgcaagtggacattgggagggctgtgaggtttgtggtggaaaaggaaatatctccacataaatactagatagaaggcttctcagaaactactttgtgatgattgcattcacctcacggagtggagcattcctattgacagagcagtttggaaacactcttgttgtagaatctgctagtggagatttggagcgctttgaggcctatggtagtaaagggaagagcttcacataaaatctagacagaagcattctcagaaaatactttgtgatgattgagtttaacacacagagctgaacattcctttggatggagaaggtttgaaacacactttctgtagaatctgcgagtggatatttggacctctctgaggatttcgttggaaacgggataactgcacctaactaaacggaagcattctcacaaaattctttgtgatgtttgcattcaaatcccagagttgaaccttcctttgatagttcagttttgaaacactctttttgtaggatctacaggtggatatttggaccactctttggccttcgttcgaaaagggtacatcttcaaataaaatctagacagaagccttctcagaaacttctctgtgacgattgcattcaactcaaagagttgaaccctcctatggatagagcagttttgaatctctctttatgtggaatctgcaagtggatatgtggtcctctttgaagatgtctttggaaacgggaatatcttcacataaaaactaaacagaagcattctcaggaaacttctctgtgatgtttgtgttcaactcacagagtttcacgttgcttttcatagagcagatgagaaacatgcttttcgtagggtctgcaagtggacatttggagagatttcaggcctgtggtggaaaacgaattatcgtcacgtaaaaactagagggaagcattgtcagaaacttgtttgtgatgactgcattcaactcacagagttgaaggttccttttcaaacagcagtttccaaacactctttctgtggcatctgcaagtggatgtttgggcctctttgaagatttcgttggaaacgggataatcttcacagaaaagctaaacagaagcattctcagaaacttctttgtgatgttcgctttcaactcacagagttgaactttccttttgagagagaagctttgaaacactctttttctagaatctgcaagtgaatatttggagggctttgaggcctgtggtggaaaaggaattatcttcccgtaagaactagatagatgcattctcagaaactactttgtgacgattgcattcaagtcacagaggtgaacattccctttcacagagcactttggaaactctcgttgtgtagaatctgcaagtggagatatggaccgctttgaggcctatggtagtaaaggaaacagcttcatataaaaactagacagccagcattctcagaaaactctttgtgacgactgagtttaactcacagggctgaacattcctttggatggagcagtttggaaacacactatctgtaggatctgcaagcggatacttgggcctctctgaggatttcgttggaaacgggataaaccgcacagaactaaacagaagcattctcagaaccttcttcgtgatgtttgcattcaacccacattgttgaacctttctttgatagttcaggtttgaaacactctttttgtagaaactgcaagtggataactgcacttctttgaggcctatcgtagtaaaggaaataacttcctataaaaacaagacagaagctttctcagaaaattctctgggatgattgagttgaactcacagagcagtactttccttgggatggagtagtttcgaaacacactttctgtagaatctacaagtggatatttggacctgtcagaggaattcgttgcaaacgggataatttcagctaagtaaacagaagcagtctcagaatcttcttgtgatgtttgcattcaaatcccagaattgaaccttcctttgaaagttcaggttggaaacactctttttgcaggatctacaagtggatattcggaccactctgtggacttcgatcgaaacgggtatatcttcacataacatctagacagaagcattctcagaaacttttctgtgatgactgcattcaactcacagagttgaacactccttttgagagcgcagttttgaaactctctttctctggaatctgcaaggggacatgcagacctctttgaaggtttcgttggaaacggaatcatcttcacataaaaattacacagaagcattctcaggaactccttggtgatgtttgtattcaacttccagagttgaactttccttcggaaagagcagctatgaaacaccctttttctagaatctgcaagtggacattgggagggctgtgaggtttgtggtggaaaaggaaatatctccacataaatactagatagaagccttctcagaagctactttgtgatgattgcattcacctcacggagtggagcattcctattgacagagcagtttggaaacactcttcttgtagaatcggctagtggagatttggagcgctttgaggcctatggtagtaaagggaagagcttcacataaaatctagacagacgcattctcagaaaatactttgtgatgattgagtttaacacacagagctgaacattcctttggatggagaaggtttgaaacacactttctgtagaatctgcgagtggatatttggacctctctgaggatttcgttggaaatgggataactgcacctaactaaacggaagcattctcacaaaattctttgtgatgtttgcattcaaatcccagagttgaaccttcctttgatagttcagctttgaaacattctttttgtaggttctgcaagtggatatttggacgactctttggccttcgttcgaaacgggtacatcttcaaatgaaatctagacagaagccttctcagaaacttctctgtgacgattgcattcaactcaaagcgttgaaccctcctatggatagagcagttttgaatctctctttttgtggaatctgcaagtggatatgtggtcctctttgaagatgtctttggaaacgggaatatcttcacataaaaactaaacagaagcattctcagaaacttctctgtgatgtttgtgttcaactcacagagtttcacgttgcttttcatagagcagatgagaaacatgcttttcgtaaggtctgcaagtggacatttggagagatttcaggcctgtggtggaaaacgaattatcgtcacgtaaaaactagagagaagcattgtcagaaacttgtttgtgatgactgcattcaactcacagagttgaaggttccttttcaaacagcagtttccaaacactctttctgtggcatctgcaagtggatgtttgggcctctttgaagatttcgttggaaacgggataatcttcacagaaaagctaaacagaagcatgctcagaaacttctttgtgatgtttgctttcaactcacagagttgaactttccttttgagagagaagctttgaaacactctttttctagaatctgcaagtggatatttggagggctttgaggcctgaggtggaaaaggaattatcttctcgtaagaactagatagatgcattctcggaaactactttgtgacgattgcattcaagtcacagaggtgaacattccctttcagagagcactttggaaactctcgttgtgtagaatctgcaagtggagatatggaccgctttgaggcctatggtagtaaaggaaacagcttcatataaaaactagacagcagcattctcagaaaactctttgtgacgactgagtttaactcacagggctgaacattcctttggatggagcagtttggaaacacactatctgtaggatctgcaagcggatacttgggcctccctgaggatttcgttggaaacgggataaaccgcacagaactaaacagaagcattctcagaactttcttcgtgatgtttgcattcaacccacagtgttgaacctttctttgatagttcaggtttgaaacactctttttgtagaaactgcaagtggataactgcacttctttgaggcctatcgtagtaaaggaaataacttcctataaaaacaagacagaagctttctcagaaaattctctgggatgattgagttgaactcacagagcagtactttccttgggatggagtagtttcgaaacacactttctgtagaatctgcaagtggatatttggacctgtctgaggaattcgttgcaaacgggataatttcagctaagtaaacagaagcagtctcagaatcttcttgtgatgtttgcattcaaatcccagaattgaaccttcctttgaaagttcaggttggaaacactctttctgcaggatctacaagtggatattcggaccactctgtggacttcgttcgaaacgggtatatcttcacataacatctagacagaagcattctcagaaacttttctgtgatgactgcattcaactcacagagttgaacactccttttgagagcgcagttttgaaactctctttctctggaatctgcaaggggacatgcagacctctttgaaggtttcgttggaaacggaatcatcttcacataaaaattacacagaagcattctcaggaactccttggtgatgtttgtattcaacttccagagttgaactttccttcggaaagagcagctatgaaacactctttttctagaatctacaagtggacattgggagggctgtgaggtttgtggtggaaaaggaaatatctccacgtaaatactagatagaaggcttctcagaaactacgttgtgatgattgcattcacctcacggagtggagcattcctattgacagagcagtttggaaacagtcttgttgtagaatctgctagtggagatttggagcgctttgaggcctatggtagtaaagggaagagcttcacataaaatctagacagaaacattctcagaaaatactttgtgatgattgagtttaacacacagagctgaacattcctttggatggagaaggtttgaaccacactttctgtagaatctgcgagtggatatttggacctctctgaggatttcgttggaaaccggataactgcacctaactaaacggaagcattctcacaaaattctttgtgatgtttgcattcaaatcccagagttgaaacttcctttgatagttcagctttgaaacactctttttgtaggatctacaggtggatatttggaccactctttggccttcgttcgaaaagggtacatcttcaaataaaatctagacagaagccttctcagaaacttctctgtgacgattgcattcaactcaaagcgttgaaccctcctatggatagagcagttttgaatctctctttttgtggcatctgcaagtggatgtttgggcctctttgaagatttcgttggaaacgggataatcttcacagaaaagctaaacagaagcattctcagaaacttctctgtgatgtttgtgttcaactctcagagtttcacgttgcttttcatagagcagatgagaaacatgcttttcgtagggtctgcaagtggacatttggagagctttcaggcctttggtggaaaacgaattatcgtcacgtaaaaactagagagaagcattgtcagaaacttgtttgtgatgactgcattcaactcacagagttgaaggttccttttcaaacagcagtttccaaacactctttctgtggcatctgcaagtggatgtttgggcctctttgaagatttcgttggaaacgggataatcttcacagaaaagctaaacagaagcattatcagaaacttctttgtgatgtttgctttcaactcacagagttgaactttccttttgagagagaagctttgaaacactctttttctaaaatctgcaagtggatatttggagggctttgaggcctgaggtggaaaaggaattatcttcccgtaagaactagatagatgcattctcagaaactactttgtgacgattgcattcaagtcacagaggtgaacattccctttcacagagcactttggaaactctcgttgtgtagaatctgcaagtggagatatggaccgctttgaggcctatggtagtaaaggaaacagcttcatataaaacctagacagcagcattctcagaaaactctttgtgacgactgagtttaactcacagggctgaacattcctttggatggagcagtttggaaacacactatctgtaagatctgcaagcggatacttgggcctctctgaggatttcgttggaaatgggataaaccgcacagaactaaacagaagcattctcagaaccttcttcgtgacgtttgcattcaacccacagtgttgaacctttctttgatagttcaggtttgaaacactctttttgtagaaactgcaagtggataactgcacttctttgaggcctatcgtagtaaaggaaataacttcctataaaaacaagacagaagctttctcagaaaattctctgggatgattgagttgaactcacagagcagtactttccttgggatggagtagtttcgaaacacactttctgtagaatctgcaagtggatatttggacctgtctgaggaattcgttgcaaacgggataatttcagctaagtaaacagaagcagtctcagaatcttcttgtgatggttgcattgaaatcccagaattgaaccttcctttgaaagttcaggttggaaacactctttttgcaggatctacaagtggatattcggaccacactgtggacttcgttcgaaacgggtatatcttcacataacatctagacagaagcattttcagaaacttttctgtgatgactgcattcaactcacagagttgaacactccttttgagagcgcagttttgaaactctctttctctggaatctgcaaggggacatgcagacctctctgaaggtttcgttggaaacggaatcatcttcacataaaaattacacagaagcatcctcaggaactccttggtgatgtttgtattcaacttccagagttgaactttccttcggaaagagcagctatgaaacactctttttctagaatctgcaagtggacattgggagggctgtgaggtttgtggtggaaaaggaaatatctccacataaatactagatagaagccttctcagaaactactttgtgatgattgcattcacctcacggattggagcattcctattgacagagcagtttggaaacactcttcttgtagaatcggctagtggagatttggagcgctttgaggcctatggtagtaaagggaagagcttcacataaaatctagacagaagcattctcagaaaatactttgtgatgattgagtttaacacacagagctgaacattcctttggatggagaaggtttgaaacacactttctgtagaatctgcgagtggatatttggacctctctgaggatttcgttggaaacgggataactgcacctaactaaacggaagcattctcacaaaattcttcgtgatgtttgctttcaaatcccagagttgaaccttcctttgatagttcagctttgaaacactctttttgtaggatctgcaagtggatatttggaccactctttggccttccttcgaaacgggtacatcttcatataaaatctagacagaagccttctcagaaacttctctgtgacgattgcattcaactcaaagagttgaaccctcctatggatagagcagttttgaatctctctttttgtggaatctgcaagtggatatgtggtcctctttgaagatgtctttggaaacgggaatatcttcacattaaaactaaacagaagcattctcagaaacttctctgtcatgtttgtgttcaactcacagagtttcacgttgcttttcatagagcagaggagaaacatgctttttgtagggtctgcaagtggacgtttggagagatttcaggcctgtggtggaaaacgaattatcgtcacgtaaaaactagagagaagcattgtcagaaacttgtttgtgatgactgcattcaactcacagagttgaaggttccttttcaaacagcagtttccaaacactctttctgtggcatctgcaagtggatgtttgggcctctttgaagatttcgttggaaacgggataatcttcacagaaaagctaaacagaagcattctcagaaacttctttgtgatgtttgctttcaactcacagagttgaactttccttttgagagagaagctttgaaacactctttttctacaatctgcaagtggatatttggagggctttgaggcctgtggtggaaaaggaattatcttcccgtaagaactagatggatgcattctcagaaactactttgtgacgattgcattcaagtcacagaggtgaacattccctttcagagagcactttggaaacccccgttgtgtagaatctgcaagtggagatatggaccgctttgaggcctatggtagtaaaggaaacagcttcatataaaaactagacagcagcattctcagaaaactctttgtgacgactgagtttaactcacagggctgaacattcctttggatggagcagtttggaaacacactatctgtaggatctgcaagcggatacttgggcctccctgaggatttcgttggaaacgggataaaccgcacagaactaaacagaagcattctcagaaccttcttcgtgatgtttgccttcaacccacagtgttgaacctttctttgatagttcaggtttgaaacattctttttgtagaaactgcaagtggataactgcacttctttgaggcctatcgtagtaaaggaaataacttcctataaaaacaagacagaagctttctcagaaaattctctgggatgattgacttgaactcacagagcagtactttccttgggatggagtagtttcgaaacacactttctgtagaatctgcaagtggatatttgaacctgtctgaggaattcgttgcaaacgggataatttcagctaagtaaacagaagcagtctcagaatcttcttgtgatgtttgcattcaaatcccagaattgaaccttcctttgaaagttcaggttggaaacactctttttgcaggatctacaagtggatattcggaccactctgtggacttcgttcgaaacgggtatatcttcacataacatctagacagaagcattctcagaaacttttctgtgatgactgcattcaactcacagagttgaacactccttttgagagcgcagttttgaaactctctttctctggaatctgcaaggggacatgcagacctctttgaaggtttcgttggaaacggaatcatcttcacataaaaattacacagaagcattctcaggaactccttggtgatgtttgtattcaacttccagagttgaactttgcttcggaaagagcagctatgaaacactctttttccagaatctgcaagtggacattgggagggctgtgaggtttgtggtggaaaaggaaatatctccacataaatactagatagaagccttctcagaaacttcttggtgatgattgcattcacctcacgcagtggagcattcttattgacagagcagtttggaaaccctcttgttgtagaagctgctagtggagatttggaccgctttgaggcctatggtagtaaagggaagagcttcacataaaatctagacagaagcattctcagaaaatactttgtgatgattgagtttaacacacagagctgaacattactttggatggagcaggtttgaaacacactttctatagaatctgcgagtggatatttggacctctctgaggatttcgttggaaacgggataactgcacctaactaaacggaagcattctcacaaaattctttgtgatgtttgcattcaaatcccagagttgaaccttcctttgatagttcagctttgaaacactctttttgtaggatctgcaggtggatatttggaccactctttggccttcgttcgaaacgggtacatcttcaaataaaatctagacagaagccttctcagaaacttctctgtgacgattgcattcaactcaaagcgttgaaccctcctatggatagagcagttttgaatctctctttttgtggaatctgcaagtggatatgtggtcctctttgaagatgtctttggaaacgggaatatcttcacataaaaactaaacagaagcattctcagaaagttctctgtgatgtttgtgttcaactcacagagtttcacgttgcttttcatagagcagatgagaaacatgcttttcgtagggtctgcaagtggacatttggagagatttcaggcctgtggtggaaaacgaattatcgtcacgtaaaaactagagagaagcattgtcagaaacttgtttgtgatgactgcattcaactcacagagttgaaggttccttttcaaacagcagtttccaaacactctttctgtggcatctgcaagtggatgtttgggcctctttgaagatttcgttggaaacgggataatcttcacagaaaagctaaacagaagcatgctcagaaacttctttgtgatgtttgctttcaactcacagagttgaactttccttttgagagagaagctttgaaacactctttttctagaatctgcaagtggatatttggagggctttgaggcctgaggtggaacaggaattatcttcccgtaagaactagatagatgcattctcagaaactactttgtgacgaatgcattcaagtcacagaggtgaacattccctttcagagagcactttggaaactctcgttgtgtagaatctgcaagtggagatatgcaccgctttgaggcctatggtagtaaaggaaacagcttcatataaaaactagacagcagcattctcagaaaactctttgtgacgactgagtttaactcacagggctgaacattcctttggatggagcagtttggaaacacactatctgtaggatctgcaagcggatacttgggcctctctgaggatttcgttggaaacgggataaaccgcacagaactaaacagaagcattctcagaaccttcttcgtgatgtttgcattcaacccacagtgttgaacctttctttgatagttcaggtttcaaacactctttttgtagaaactgcaattggataactgcacttctttgaggcctatcgtagtaaaggaaataacttcctataaaaacaagacagaagctttctcagaaaattctctgggatgattgagttgaactcacagagcagtactttccttgggatggagtagtttcgaaacacactttctgtagaatctgcaagtggatatttggacctgtctgaggaattcgttgcaaacgggataatttcagctaagtaaacagaagcagtctcagaatcttcttgtgatgtttgcattcaaatcccagaattgaaccttcctttgaaagttcaggttggaaacactctttttgcaggatctacaagtggatattcggaccactctgtggacatcgttcgaaacgggtatatcttcacataacatctagacagaagcattctcagaaacttttctgtgatgactgcattcaactcagagagttgaacactccttttgagagcgcagttttgaaactctctttctctggaatctgcaaggggacatgcagacctctttgaaggtttcgttggaaacggaatcatcttcacataaaaattacacagaagcatcctcaggaactctttggtgatgtttgtattcaacttccagagttgaactttccttcggaaagagcagctatgaaacactctttttctagaatctgcaagtggacattgggagggctgtgaggtttgtggttgaaaaggaaatatctccacataaatactagatagaagccttctcagaaactactttgtgatgactgcattcacctcacggagtggagcattcctattgacagagcagtttggaaacactcttcttgtagaatcggctagtggagatttggagcgctttgaggcctatggtagtaaagggaagagcttcacataaaatctagacagaagcattctcagaaaattctttgtgatgattgtgtttaacacatagagctgaacattcctttggagggagaaggtttgaaacacactttctgtagaatctgcgagtggatatttggacctctctgaggatttcgttggaaacgggataactgcacctaactaaacggaagcattctcacaaaattctttgtgatgtttgcattcaaatcccagagttgaaccttcctttgatagttcagctttgaaacactctttttgtaggatctgcaggtggatatttggcctactctttggccttcgttcgaaacgggtacatcttcaaataaaatctagacagaagccttctcagaaacttctctgtgatgattgcattcaactcaaagcgttgaaccctcctatggatagagcagttttgaatctctctttttgtggaatctgcaagtggatatgtggtcctctttgaagatgtctttggaaacgggaatatgttcacataaaaactaaacagaagcattctcagaaacttctctgtgatgtttgtgttcaactcacagagtttcacgttgcttttcatagagcagatgagaaacatgcttttcgtagggtctgcaagtggacatttggagagatttcaggcctgtggtggaaaacgaattatcgtcacgtaaaaactagagagaagcattgtcagaaacttgtttgtgatgactgcattcaactcacagagttgaaggttccttttcaaacagcagtttccaaacactctttctgtggcatctgcaagtggatgtttgggcctctttgaagatttcgttggaaacgggataatcttcacagaaaagctaaacagaagcattctcagaaacttctttgtgatgtttgatttcaactcacagagttgaactttccttttgagagagaagctttgaaacactctttttctagaatctgcaagtggatatttggagggctttgaggcctgaggtggaaaaggaattatcttcccgtaagaactagatagatgcattctcagaaactactttgtgacgattgcattcaagtcacagaggtgaacattccctttcagagagcactttggaaactctcgttgtgtagaatctgcaagtggagatatggaccgctttgaggcctatggtagtaaaggaaacagcttcatataaaaactagacagcattctcagaaaactctttgtgacgactgagtttaactcacagggctgaacattcctttggatggagcagtttggaaacacactatctgtaggatctgcaagcggatacttgggcctctctgaggattgcgttggaaacgggataaaccgcacagaacgaaacagaagcattctcagaaccttcttcgtgatgtttgcattcaacccacagtgttgaacctttctttgatagttcaggtttgaaacactctttttgtagaaactgcaagtggataactgcacttctttgaggcctatcgtagtaaaggaaataacttcctataaaaacaagacagaagctttctcagaaaattctctgggatgattgagttgaactcacagtgcagtactttccttgggatggagtagtttcgaaacacactttctgtagaatctgcaagtggatatttggacctgtctgaggaattcgttgcaaacgggataatttcagctaagtaaacagaagcagtctcagaatcttcttgtgatgtttgcattcaaatcccagaattgaaccttcctttgaaagttcaggttggaaacactctttttgcaggatctacaagtggatattcggaccactctgtggacttcgttcgaaacgggtatatcttcacataacatctagacagaagcattctcagaaacttttctgtgatgactgcattcaactcacagagttgaacactccttttgagagcgcagttttgaaactctctttctctggaatctgcaaggggacatgcagacctctttgaaggtttcgttggaaagggaatcatcttcacataaaaattacacagaagcatcctcaggaactccttggtgatgtttgtattcaacttccagagttgaactttccttcggaaagaacagctatgaaacactctttttctagaatttgcaagtggacattgggagggctgtgaggtttgtggtggaaaaggaaatatctccacataaatactagatagaagccttctcagaaactactttgtgatgattgcattcacctcacggagtggagcactcctattgacagagcagtttgtaaacactcttcttgtagaatcggctagtggagatttggagcgctttgagtcctatggtagtaaagggaagagcttcacataaaatctagacagaagcattctcagaaaatactttgtgatgattgagtttaacacacagagctgaacattcctttggatggagaaggtttgaaacacactttctgtagaatctgcgagtggatatttggacctctctgaggatttcgttggaaacgggataactgcacctaactaaacggaagcattctcacaaaattctttgtgatgtttgcattcaaatcccagagttgaaccttcctttgatagttcagctttgaaacactctttttgtaggctctgcaggtggatatttggaccactctttggccttcgttcaaaacgggtacatcttcaaataaaatctagacagaagccttctcagaaacttctctgtgacgattgcattcaactcagagagttgaaccctcctatggatagagcagttttgaatctctctttttgtggaatctgcaagtggatatgtggtcctctttgaagatgtctttggaaacgggaatatcttcacataaaaactaaacggaagcattctcagaaacttctctgtgatgtttgtgttcaactcacagagtttcacgttgcttttcatagagcagatgagaaacatgcttttcgtagtgtctgcaagtggacatttggagagctttcaggcctgtggtggaaaacgaattatcgtcacgtaaaaactagagagaagcattgtcagaaacttgtttgtgatgactgcattcaactcacagagttgaaggttccttttcaaacagcagtttccaaacactctttctgtggcatctgcaagtggatgtttgggcctctttgaagatttcgttggaaacgggataatcttcacagaaaagctaaacagaagcattctcagaaacttctttgtgatgtttgctttcaactcacagagttgaactttccttttgagagagaagctttgaaacactctttttctagaatctgcaagtggatatttggagggctttgaggcctgtggtggaaaaggaattatcttcccgtaagaactagatagatgcattctcagaaactactttgtgacgattgcattcaagtcacagaggtgaacatttcctttcagagagcactttggaaactctcgttttgtagaatctgcaagtgcagatatggaccgctttgaggcctatggtagtaaaggaaacagcttcatataaaaactagacagcagcattctcagaaaactctttgtgacgactgagtttaactcacagggctgaacattcctttggatggagcagtttggaaacacactatctgtaggatctgcaagcggatacttgggcctaccctgaggatttcgttggaaacgggataaaccgcacagaactaaacagaagcattctcagaaccttcttcgtgatgtttgcattcaacccacagtgttgaacctttctttgatagttcaggtttgaaacactctttttgtagaaactgcaagtggataactgcacttctttgaggcctatcgtagtaaaggaaataacttcctataaaaacaagacagaagctttctcagaaaattctctgggatgattgagtagaactcacagagcactactttccttgggatggagtagtttcgaaacacactttctgtagaatctgcaagtggatatttggacctgtctgaggaattcgttgcaaacgggataatttcagctaagtaaacagaagcagtctcagaatcttcttgtgatgtttgcattcaaatcccagaattgaaccttcctttgaaagttcaggttggaaacactctttttgcaggatctacaagtagatattcggaccactctgtggacttcgttcgaaacgggtatatcttcacataacatctagacagaagcattctcagaaacttttctgtgatgactgcattcaactcacagagttgaacactccttttgagagcgcagttttgaaactctctttctctggaatctgcaaggggacatgcagacctctttgaaggtttcgttggaaacggaatcatcttcacataaaaattacacagaagcattctcaggaactccttggtgatgtttgtattcaacttccagagttgaactttccttcggaaagagcagctatgaaacactctttttctagaatctgcaagtggagattgggagggctgtgaggattgtggtggaaaaggaaatatctccacgtaaatactagatagaagccttctcagaaactactttgtgatgattgcattcacctcacggagtggagcattcctattgacagagcagtttggaaacactcttgttgtagaatctgctagtggagatttggagcgctttgaggcctatggtagtaaagggaagagcttcacataaaatctagacagaagcattctcagaaaatactttgtgatgattgagtttaacacacagagctgaacattcctttggatggagaaggtttgaaacacactttctatagaatctgcgagtggatatttggacctctctgaggatttcgttggaaacgggataactgcacctaactaaacggaagcattctcacaaaattctttgtgatgtttgcattcaaatcccagagttgaaccttcctttgatagttcagctttgaaacactctttttgtaggatctgcaggtggatatttggaccactctttggccttcgttcgaaaagggtacatcttcaaatttaatctagacagaagccttctcagaaacttctctgtgacgattgcattcaacccaaagagttgaaccctcctatggatagagcagttttgaatctctctttttgtggaatctgcaagtggatatgtggtcctctttgaagatgtctttggaaacgggaatatcttcacataaaaactaaacagaagcattctcagaaacttctctgtgatgtttgtgttcaactcacagagtttcacgttgcttttcatagagcagatgagaaacatgcttttcgtagggtctgcaagtggacatttggagagctttcaggcctgtggtggaaaacgaattatcgtcacgtaaaaactagagagaagcattgtcagaaacttgtttgtgatgactgcattcaactcacagagttgaaggttccttttcaaacagcagtttccaaacactctttctgtggcatctgcaagtggatgtttgggcctctttgaagatttcgttggaaacgggataatcttcacagaaaagctaaacagaaagcatgctcagaaacttctttgtgatgtttgctttcaactcacagagttgaactttccttttgagagagaagctttgaaacactctttttctagaatctgcaagtggatatttggagggcattgaggcctgaggtggaacaggaattatcttcccgtaagaactagatagatgcattctcagaaactactttgtgacgattgcattcaagtcacagaggtgaacattccctttcagagagcactttggaaactctcgttgtgtagaatctgcaagtggagatatggaccgctttgaggcctatggtagtaaaggaaacagcttcgtataaaaactagacagcagcattctcagaaaactctttgtgacgactgagtttaactcacagggctgaacattcctttggatggagcagtttggaaacacactatctgtaggatctgcaagcggatacttgggcctccctgaggatttcgttggaaacgggataaaccgcacagaactaaacagaagcattctcagaaccttcttcgtgatgtttgcattcaacccacagtgttgaacctttctttgatagttcaggtttgaaacactctttttgtagaaactgcaggtggataactgcacttctttgaggcctatcgtagtaaaggaaataacttcctataaaaacaagacagaagctttctcagaaaattctctgggatgattgagttgaactcacagagcagtactttccttgggatggagtagtttcgaaacacactttctgtagaatctgcaagtggatattcggacctgtctgaggaattcgttgcaaacgggataatttcagctaagtaaacagaagcagtctcagaatcttcttgtgatgtttgcattcaaatcccagaattgaaccttcctttgaaagttcaggtttgaaacactctttttgcaggatctacaagtggatattcggaccactctgtggacttcgttcgaaacgggtatatcttcacataacatctagacagaagcattctcagaaacttttctgtgatgactgcattcaactcacagagttgaacactccttttgagagcgcagtttggaaactctctttctctggaatctgcaaggggacatgcagacctctttgaaggtttcgttggaaacggaatcatcttcacataaaaattacacagaagcattctcaggaactccttggtgatgtttgtattcaacttccagagttgaactttccttcggaaagagcagctatgaaacactctttttctagaatctgcaagtggacattgggagggctgtgaggtttgtggtggaaaaggaaatatctccacataaatactagatagaagccttctcagaaactactttgtgatgattgcattcacctcacggagtggagcattcctattgacagagcagtttggaaacactcttcttgtagaatcggctagtggagatttggagcgctttgaggcctatggtagtaaagggaagagcttcacataaaatctagacagaagcattctcagaaaatactttgtgatgattgagtttaacacacagagctgaacattcctttggatggagaaggtttgaaacacactttctgtagaatctgcgagtggatatttggacctctctgaggatttcgttggaaacgggataactgcacctaactaaacgaaagcattctcagaaacttcttggtgatgtttgcattcaaatcccagagttgaaccttcctttgatagttcaggtttgaaacactctttttgtaggatctgcaagtggctatttggaccactctgtggccttcgttcgaaacggttatatcttcgcataaaatctagacagaagcttctcagaaacttctctgtgacgattgcattcaactcaaagcgttgaaccctcctatggatagagcagttttgaatctctctttttgtggaatctgcaagtggatatgtggtcctctttgaagatgtctttggaaacgggaatatcttcacataaaaactaaacagaagcattctcagaaacttctctgtgatgtttgtgttcaactcacagagcttcacgttgcttttcatagagcagatgagaaacatgcttttcatagggtctgcaagtggacatttggagagctttcaggcctgtggtggaaaacgaattatcgtcacgtaaaaactagagagaagcattgtcagaaacttgtttgtgatgactgcattcaactcacagagttgaaggttccttttcaaacagcagtttccaaacactctttctgtggcatctgcaagtggatgtttgggcctctttgaagatttcgttggaaacgggataatcttcacagaaaagctaaacagaagcattctcagaaacttctttgtgatgtttgctttcaactcacagagttgaactttccttttgagagagaagctttgaaacactctttttctagaatctgcaagtggatatttggagggcttggaggcctgtggtggaaaaggaattatcttcccataagaactagatagatgcattctcagaaactactttgtgacgattgcattcaagacacagagttgaacattccctttcagagagcactttggaaactctcgttgtgtagaatctgcaagtggagatatggaccgctttgaggcctatggtagtaaaggaaacagcttcatataaaaactagacagcagcattctcagaaaactctttgtgacgactgagtttaactcacagggctgaacattcctttggatggagcagtttggaaacacactatctgtaggatccgcaagcggatacttgggcctccctgaggatttcgttggaaacgggataaaccgcacagaactaaacagaagcattctcagaaccttcttcgtgatgtttgcattcaacccacagtgttgaacctttctttgatagttcaggtttgaaacactctttttgtagaaactgcaagtggataactgcacttctttgaggcctatcgtagtaaaggaaataacttcctataaaaacaagacagaagctttctcagaaaattctctgggatgattgagttgaactcacagagcagtactttctttgggatggagtactttcgaaacacactttctgtacaatctgcaagtggatatttggacctgtctgaggaattcgttgcaaacgggataatttcagctaagtaaacagaagcagtctcagaatcttcttgtgatgtttgcattgaaatcccagaattgaaccttcctttgaaagttcaggttggaaacactctttttgcaggatctacaagtggatattcggaccactctgtggacttcgttcgaaacgggtataccttcacataacatctagacagaagcattctcagaaacttttctgtgatgactgcattcaactcacagagttgaacactccttttgagagcgcagttttgaaactctctttctctggaatctgcaaggggacatgcagacctctttgaagggtttcgttggaaacggaatcatcttcacataaaaattacacagaagctttctgagaaactttttgtgatgtatgcattcatcacagagatttgaacatttattttcatggagcagtttggaaacagtctttttgcagaatctgcaaagggaaatatgtaggcagtttgaggcctatggtggaaaaggaaatatcttcatataagaactacacagaagccttctcagaaactacgttgtgatgattgcattcacctcacggagtggagcattcctattgacagagcagtttggaaacacccttgttgtagaatctgctagtggagatttggagcgctttgaggcctatggtagtaaatggaagagcttcacataaaatctagacagaagcattctcagaaaatactttgtgatgattgagtttaacacacagagctgaacattcctttggatggagaaggtttgaaacacactttctgtagaatctgcgagtggatatttggacctctctgaggatttcgttggaaacgggataactgcacctaactaaacggaagcattctcacaaaattctttgtgatatttgcattcaaatcccagagttgaaccttcctttgatagttcagctttggaacactctttttgtaggatctgcaggtggatatttggaccactctttggccttcgttcaaaacgggtacatcttcaaataaaatctagacagaagccttctcagaaacttctctgtgatgattccattcaactcaaagcgttgaaccctcctatggatagagcagttttgaatctctctttttgtggaatctgcaactggatatgtggtcctgtttgaagatgtctttggaaacgggaatatcttcacataaaaactaaacggaagcattctcagaaacttctctgtgatgtttgtgtccaaatcacagagtttcacgttgcttttcatagagcagatgagaaacatgcttttcgtagggtctgcaagtggacatttggagagatttcaggcctgtggtggaaaacgaattatcgtcacgtaaaaactagagagaagcattgtcagaaacttgtttgtgatgactgcattcaactcacagagttggaggttccttttcaaacagcagtttccaaacactctttcggtggcatctgcaagtggatgtttgggcctctttgaagatttcgttggaaacgggataatcttcacagaaaagctaaacagaagcatgctcaagaaacttctttgtgatgtttgctttcaactcacagagttgaactttccttttgagagagaagctttgaaacactctttttctagaatctgcaagtggatatttggagggctttgaggcctgaggtggaacaggaattatcttcccgtaagaactagatagatgcattctcagaaactactttgtgacgattgcattcaagtcacggaggtgaacattccctttcagagagcactttggaaactctcgttgtgtagaatctgcaagtggagatatggaccgctttgaggcctatggtagtaaaggaaacaacttcatataaaaactagacagcagcattctcagaaaactctttgtgacgactgagtttaactcacagagctgaacattcctttggatggagcagtttggaaacacactatctgtaggatctgcaagcggatacttgggcctctctgaggattgcgttggaaacgggataaaccgcacagaactaaacagaagcattctcagaaccttcttcgtgatgtttgcattcaacccacagtgttgaaactttctttgatagttcaggtttgaaacactctttttgtagaaacttcaagtggataactgcacttctttgaggcctatcgtagtaaaggaaataacttcctataaaaacaagacagaagctttctcagaaaattctctgggatgattgagttgaactcacagagcagtactttctttgggatggagtagtttcgaaacacactttctgtacaatctgcaagtggatatttggacctgtctgaggaattcgttgcaaacgggataatttcagctaagtaaacagaagcagtctcagaatcttcttgtgatgtttgcattcaaatcccagaattgaaccttcctttgaaagttcaggttggaaacactctttttgcaggatctacaagtggatattcggaccactctgtggacttcgtttgaaacgggtatatcttcacataacatctagacagaagcattctcagaaacttttctgtgatgactgcattcaactcacagagttgaacactccttttgagagcgcagttttgaaactctctttctctggaatctgcaaggggacatgcagacctctttgaaggtttcgttggaaacggaatcatcttcacataaaaattacacagaagcatcctcaggaactccttggtgatgtttgtattcaacttccagagttgaactttccttcggaaagagcagctatgaaacactctttttccagaatctgcaagtggacattgggagggctgtgaggtttgtggtggaaaaggaaatatctccacataaatactagatagaagccttctcagaaactactttgtgatgattgcattcacctcacggagttgagcattcctattgacagagcagtttggaaacactcttcttgtagaatcggctagtggagatttggagcgctttgaggcctatggtagtaaagggaagagcttcacataaaatctagacagannnnnnnnnnnnnnnnnnnnnnnnnnnnnnnnnnnnnnnnnnnnnnnnnnnnnnnnnnnnnnnnnnnnnnnnnnnnnnnnnnnnnnnnnnnnnnnnnnnnagcattctgagaaactactttgtgatgattgcattcaagtcacagagctgaacattccctttgacagagcagtttggaaactctctttgtgtagaatctgcaagtggagatatggaatgctttgaggactatggtagtaaaggaaatagcttcatagaaaagctagacagtagcattctcagaaacttctttgtgatgcttgcattcaactcacagagttgaactttcctttcgagagagaagctttgaaacactctttttccagaatctgcaagtggacatttggagggctttgaggcctgtggtggaaaaggaattatcttccctaaaagctagatagaagcattgtcagaaacttctttgtgatgattgcattcaactcacagagttgaaggttccttttcaaacagcagtttccaatcactctttctgtggaatctgcaagtggatatttggacctctttgaagatttcgttggaaacgggagaatcttcacagaaaagctaaacagaagcattctcagaaacttctctgtgatgtttgtgttcaactcccagagtttcacattgcttctcatagagtagttctgaaacatgcttttcatactgtctgcaagtggacatttggagcgctttcaggcctgtggtggaaatcgaattatggtcacataaaaactggagagaagccttctgcgaaacttctctgagatgattgcattcaactcacagagttgaaccctcctatggatagagcagtgttgaaactctctttttgtggaatctgcaagtggatatgtggacccctccgaagatgtctttggaaacgggaatatcttcacataaaaactaaacagaagcattctcagaaacttcttggtgatgtttgcattcaaatcccagagttgaaccttcctttgagagttcaggtttgaaacactctttttgtaggatctgcaagtggatatttggaccactctgtggccttcgttcgaaacgggtacatcttcgcataaaatctagacagaagcattctcagaaaatactttgtgatgattgagtttaactcacagagctgaacattcctttggatggagcaggtttgagacacactttttgtagaatctacaagtggatatttggacctctctgaagatttcgttggaaacgggataactgcacctaactaaacggaagcattctcagaaattgctttttgatgattgcattcacctcacagagttgaccattcctattgatagagcagtttggaaacacccttgttgtggaatgtgcaagtggagatttggagcgctttgaggcctatggtagtaaagggaatagcttcatagaaaaactagacagatgcattttcaggaactttttggtgacgtttgtattcaactcccagagttgaactttcctttggaaagagcagctatgaaacactgtttttctagaatctgcaagtggacgtttggagggctttgtggtttgtggtggaaaaggaaatatcttcacctaaatactagatagaaagcattctcagaagcttctctgagatgactgcattcaactcacggagttgaacactccttttgagagcgcagttttgaaactctccttctgtggcatctgcaaggggacatgtagacctctttgaagatttcgttggaaacggaatcatcttcacataaaatctatacagagcagtctcagaatcttctttgtgaagtttgcattcaaatcccagagttgaattttcctttcaaagttcaggtttgaaaccctctttttgcaggatctacaagtggatatttggaccactctgtgtccttcgttcgaaacgggtatatcttcacatgacatctagacagaaactttctcagaaaattctttgtgatgattgagttgaactcacagagctgaacattccttgcgatggagcagtttagaaacacactttctgcagaatctgcaagtgcatatttggacctctctgaggaattcgttggaaacgggataatttcagctgactaaacagaagcattctcagaaccttcttcgtgatgtctgcgttcaactcacagtgtggaacctttctttggtagttcaggtttgaaacactctttttgtagaaactgcaaggggatccttgcacttctttgaggcctaccgtagtaaaggagataacttcctataaaaagaagacagaagcattctcggaaccctcttcgtgatgtttgcattcaactcacagtgctgaacctttctttgatagttcagatttgaaacactcttcttgtagaaactgcaagtggatatttggtcctctctgaggatttcgttggaaacgggataaaccgcacagaactaaacagaagaattctcagagccctcttcgtgatgtttgcattcaactcacagtgctgaacctttctttgatagtgcagctttgaaacactctttttgtagaaactgcaagtggatgtttggtcctctctgaggatttcgttggaaacgggataaaccgcacagaactaaaacagagcattgtcagaaacttctttgtgatgattgcattcaactcacagagttgaaggttccttttcaaacagcagtttccaatcactctttctgtggaatctgcaagtggatatttgggcctctctgaggatttcgttggaaacgggataaaacgcacagaactaaaacagaagcattctcagaaacttctctgtgatgtttgtgttcaactcccaaagtttcacattgcttttcatagagtagttctgaaacatgcttttcgtagtgtctacaagtggacatttggagcgcttccagtcctgtggtggaaaacgaattatggtcacataaaaactggagagaagctttctcagaaacttctctgtgatgattgcattcaactcacagagttgaaccctcctatggatagagcagtgttgaaactctctttttgtggaatctgcaagtggatatgtggacctctccgaagatgtctttggaaacgggaatatcttcacataataagtaaacagaagcattctcagaaacttcttggtgatgtttgcattcaaatcccagagttgaaccttcctttgacagttcaggtttgaaacactctttttgtaggatctgcaagtggatatttggaccactctgtggccttcgttcgaaacgggtacattttcgcataaaatctagacagaagcattctcagaaaatactttgtgatgattgagtttaactcacagagctgaacattcctttggatggagcaggtttgagacacactttttgtagaatctacaagtggatatttggacctctcggaggatttcgttggaaacggcataactgcacctaactaaacggaagcattctcagaaactgctttgtgatgattgcattcacctcacagagttgaacattcctattgatagagcagtttggaaacactcttgttgtggaatgtgcaagtggagatttggagcgcttgaggcctatggtagtaaagggaatagcttcatagaaaaactagacagaagcattctcaggaaccccttggtgctgattgtattcaacttccagagttgaactttccttcggaaagagcagctatgaaacactctttttctagaatctgcaagtggatatttggagggctttgaggtttgtggtggaaaaggaaatatcttcacataaacactagatgggagcattctcagaagcttctctgtgatgactgcattcaactcacggagttgaacactccttttgagagcacagttttgaaactctctttctgtggcatctgcaaggggacatgtagacctctttgaagatttcgttggaaacggaatcatcttcacataagaactatacagaagcagtctcagaatcttctttgtgatgtttgcattcaaatcccagagttgaaatttcctttcaaagttcacgtttgaaacactctttttgcaggatctacaagtggatatttggaccactctgtgtccttcgttcgaaacgggtacatcttcacatgacatctagacagaagctttctcagaaaattctttgggatgattgagttgaactcacagagctgaacattccttgcgatgtagaagtttagaaacacactttctgcagaatctgcaagtgcatatttggacctctctgaggaattcgttggaaacgggataatttcagctgactaaacagaagcattctcagaaccttcttcgtgatgtctgaattcaactcacagtgtggaacctttctttgatagttcaggtttgaaacactctttttgtagaaactgcaaggggataattgcacttctttgaggcctaccgtagtaaaggaaataacttcctatagaaagaagacagaagcattctcagaaccctcttcgtgatgtttgcattcaactcacagtgctgaacctttctttgatagttcagctttgaaacactctttttgtagaaactgcaagtggatatttggtgctctctgaggatttcgttggaaacgggataaaccgcacagaactaaacagaagcattctcagaaacttctttgtgatgcttgcattcaactcacagagttgaactttcctttcgagagagaagctttgaaacactcgttttccagaatctgcaagtggacatttggagggctttgaggcctgtggtggaaaaggaattatcttcccgttaaagctagatagaagcattgtcagaaacttctttgtgatgattgcattcaacacacagagttgaaggttccttttcaaagagcagtttccaatcactctttctgtggaatctgcaagtggatatttggacctctttgaagatttcgttggaaacgggagaatcttcacagaaaagctaaacagaaagcattctcagaaacttctctgtgatgtttgtgttcaactcccagagtgtcacattgcttctcatagagtagttctgaaacatgcttttcgtagtgtctgcaaggggacatttggagcgctttcaggcctgtggtggaaaacgaattatggtcacataaaaactggagagaagccttctcagaaacttctctgtgatgattgcattcaactcacagagttgaaccctcctatggatagagcagtgttgaaactctctttttgtggaatctgcaagcggatatgtggacctctccgaagatgtctttggaaacgggaatatcttcacataaaaactaaacagaagcattctcagaaacttcttggtgatgtttgcattcaaatcccagagttgaaccttcctttgatagttcaggtttgaaacactctttttgtaggatctgcaagtggctatttggaccactgctgtggccttcgttcgaaacgggtatatgcttcgcataaaatctagacagaagcatcctcagaaaatactttgtgatgattgagtttaactcacagagctgaacattcctttggatggagcaggtttgagacacactttttgtagaatctacaagtggatatttggacctctctgaggatttcgttggaaacgggataactgcacctaactaaacggaagccttctcagaaactgctttgtgatgattgcattcacctcacagagttgaacattcctattgatagagcagtttggaaacactcttcatctggaatgtgcaagtggagatttggagcgctttgaggcctatggtagtaaagggaatagcttcatagaaaaactagacagatgcattctcaggtaactttttggtgatgtttgtattcaactcccagagttgaactttcctttggaaagagcagctatgaaacactctttttctagaatctgcaagtggacgtttggagggctttgtggtttgtggtggaaaaggaaatatcttcacctaaatactagatagaagcattctcagaagcttctctgtgatgactgcattcaactcacggagttgaacactccttttgagagcgcagttttgaaactctctttctgtggcatctgcaaggggacatgtagacctctttgaagatttcgttggaaacggaatcatctaacacataaaaactatacagaagcagtctcagaatcttctttgtgatgtttgcattcaaatccccgagttgaactttcctttcaaagttcacgtttgaaacactctttttgcaggatctacaagtggatatttggaccactctgtgtccttcgttcgaaacgggtatatcttcacatgacatctagacagaagctttctcagaaaattctttgggatgattgagttgaactcacagagctgagcattccttgcgatgtagcagtttagaaacacactttctgcagaatctgcaagtgcatatttggacctctgtgaggaattcgttggaaacgggataatttcagctgactaaacagaagcattctcagaaccttcttcgtgatgtctgcattcaactcacagtgtggaacctttctttgatagttcaggtttgaaacactctttctgtagaaactgcaaggggataattgcactctttgaggagtaccgtagtaaaggaaataacttcctataaaaagaagacagaagcattctcagaaccctcttcgtgatgtttgcattcaactcacagtggtgaagctttctttgatagttcagctttgaaacactcttcttgtagaaactgcaagtggatatttggtcctctctgacgatttcgttggaaacgggataaaacgcacagaactaaacagaagcattctcagaaccttcttcgtgatgtttgcattcaactcacagtgttgaacctttgtttgatagttcaggtttgaaacggtctttctgtagaaactgcaagtagatatttggacctctctgaggatttcgttggaaacgggataaaccgcacagaactaaaacagaagcattcacagaaaactcttggtgacgactgagtttaactcacagagcttaacattcctttggatggagcagtttcgaaacacactatttgtagaatctgcaagtggatatttgggcctctctgaggatttcgttggaaacgggataaaacgcacagaactaaaacagaagcattctcagaaactactttgtgatgattgcattcaagtcactgagctgaacattccctttgacagagcagtttggaaactctctttgtgtagaatctgcaagtggagatatggaatgctttgaggactatggtagtaaaggaaatagcttcatataaaagctagacagtagcattctcagaaactcctttgtgatgtttgcattcaactcacagagttgaacattccttttgagagacaagctttgaaacactctttctctagaatctgcaagtggatatttggagggctttgaggcctgtggtggaaaaggaattatcttcccgtaaaagctggatagaagcattgtcagaaacttctttgtgatgattgcattcaactcacagagttgaaggttccttttcaaagagcagtttccaatcactctttgtgtggaatctgcaagtggatatttggacctattttgaagatttcgttggaaacgggagaatcttcacaggaaagctaaacagaagcattctcagaaacttctctgtgatgtttgtgttcaactcccagcagtttcacattgcttttcatagagtagttctgaaacatgcttttcgtagtgtctgcaagtggacatttggagcgctttcaggcctgtggtggaaaacgaattatggttacataaaaactggagagaagccttctcagaaacttctctgggatgattgcattcaactcacagagttgaaccctcctatggatagagcagtgttgaaactctctttttgtggaatctgcaagcagatatgtggacctttccgaagatgtctttggcaacgggaatatcttcacataaaaactaaacagaagcattctcacaaaattctttgtgatgtttgcattcaaatcccagagttgaaccttcctttgatagttcagctttgaaacactctttttgtagggtctgcaggtggatatttggaccactctttggccttcgttcgaaaagggtacatcttcaaataaaatctagacagaagcattctcagaaaatactttgtgatgattgagtttaacacacagagctgaacattcctttggatggagaaggtttgaaacacactttctgtagaatctgcgagtggatatttggacctctctgaggatttcgttggaaacgggataactgcacctaactaaacggaagccttctcagaaactactttgtgatgattgcattcacctcacggattggagcattcctattgacagagcagtttggaaacactcttcttgtagaatcggctagtggagatttggagcgctttgaggcctatggtagtaaagggaagagcttcacataaaatctagacagatgcattctcaggaactttttggtgatgtttgtattcaactcccagagttgaactttcctttggaaagagcagctatgaaacactgtttttctagaatctgcaagtggacgtttggagggctttgtggtttgtggtggaaaaggaaatatcttcacctaaatactagatagaagcatcctcagaagcttctctgtgatgactgcattcaactcacggagttgaacactccttttgagagcgcagttttgaaactctctttctgtggcatctgcaaggggacatgtagacctctttgaagatttcgttggaaacggaatcatcttcacataaaaactacacagaagcagtctcagcatcttctttgtgatgtttgcattcaaatcccaggagttgaactttcctttcaaagttcacgtttgaaacactctttttgcaggatctacaagtggatatttggaccactctgtgtccttcgttcgaaacgggtatatcttcacatgacatctagacagaagctttctcagaaaattctttgggatgattgagttgaactcacagagctgagcattccttgcgatgtagcagtttagaaacacactttctgcagaatctgcaagtgcatatttggacctctgtgaggaattcgttggaaacgggataatttcagctgactaaacagaagcattctcagaaccttcttcgtgatgtctgcattcaactcacagtgtggaacctttctttgatagttcaggtttgaaacactctttttgtagaaactgcaaggggataattgcactctttgaggagtaccgtagtaaaggaaataacttcctataaaaagaagacagaagcattctcagaaccctcttcgtgatgtttgcattcaactcacaagtgctgaacctttctttgatagttcagctttgaaacactctttttgtagaaactgcaagtggatatttggtcctctctgagcatttcgttggaaacgggataaactgcacagaactaaacagaagcatcctcagaaccttcttcgtgatgtttgcattcaactcacagtgctgaacctttctttgatagttcagctttgaaacactctttttgtagaaactgcaagtggatatttggacctctctgaggatttcgttggaaacgggataaaccacacagaactaaaacagaagcattcacagaaaactcttggtgacgactgcgtttaactcacagagctgaaaatccctttggatggagcagtttcgaaaaacactatttgtagaatgtgcaagtggatattggggactctctgaggatttcgttggaaacgggataaaccacacagaactaaacagaagtattctcagaaactactttgggatgattgcattcaagtcacagagttgaacattccctttgatagagcagtttggaaacactctttttgtagaatctgcaagtggagatttggatcgctttgagacctatggtagtaaaggaaataacttcatctaaaaactagacagtagcattctcagaaacttctttgtgatgtttgcattcaattcacagagttgaactttccttttgagagagaagctttgaaacactctttttctagaatctgcaagtggacatttggagggctttgaggcctgtggtggaaaagggaatatcttcctgtaaaaactagatagaagcattgtcagaaacttctttgtgatgattgcattcaactcacagagttgaaggttccttttcaaagagcagtttccaatcactctttctgtggaatctgcaactggatatttggacctctttgaagatttcgttggaaacgggagaatcttcacagaaaagctaaacagaagcattctcagaaacttctctgtgatgtttgtgttcaactccccgagtttcacgttgcttttcatagagtagttctgaaacatgcttttcgtagtgtctgcaagtggacatttggagcgctttcaggcctgtggtggaaaacgaattatggtcacataaaaactggagagaagccttctcagaaacttctctgtgatgattgcattcaactcacagagttgaaccctcctatggatagagcagtgttgaaactctctttttgtggaatctgcaagtggatatgtggacctactccgaagatgtctttggaaacgggaatatcttcacataaaaactaaacagaagcattctcagaaacttcttggtgatgtttgcattcaaatcccagagttgaaccttcctttgagagttcaggtttgaaacactctttttgtaggatctgcaagtggatatttggaccactctgtggccttcgttcgaaacgggtacatcttcgcataaaatctagacagaagcattctcagaaaatactttgtgatgattgagtttaactcacagagctgaacattcctttggatggagcaggtttgagacacactttttgtagaatctacaagtggatatttggacctctctgaggattccgttggaaacgggataaactgcacagaactaaacagaagcattctcagaaactgctttgtgatgattgcattcacctcacagagttgaacattcctattgatagagcagtttggaaacactcttgttgtggaatgtgcaagtggagatttggagcgctttgaggcctatggtagtaaagggaatagctttatagaaaaactagacagatgcattctcaggaactttttggtgatgtttgtattcaactcctagagttgaactttcctttggaaagagcagctatgaaacactctttttctagaatctgcaagtggacgtttggagggctttgtggtttgtggtggaaaaggaaatatcttcacctaaatactagatagaagcattctcagaagcttctctgtgatgactgcattcaactcacggagttgagcactccttttgagagcgcagttttgaaactctctttctgtggcatctgcaaggggacatgtggacctctttgaagatttcgttggaaacggaatcatcttcacataaaaacaatacagaagcagtctcagaatcttctttgtgatgtttgcattcaaatcccagagttgaactttcctttcaaagttcacgtttgaaatactctttttgcaggatctacaagtggatatttggaccactctgtgtccttcgttcgaaacggcatatcttcacatgacatctagacagaagctttctcagaaaattctttgggatgattgagttgaactcacagagctgaacattccttgcgatgtagcagtttagaaacacactttctgcagaatctgcaagtgcatattgagaacgctctgaggaattcgttggaaacgggataatttcagctgactaaacagaagcattctcagaaccttcttcgtgatgtctgcattcaactcacagtgtggaacctttctttgatagttcaggtttgaaacactctttttgtagaaactgcaaggggataattgcacttctttcaggcctaccgtagtaaaggaaataacttcctatagaaagaagacagaagaattctcagagccctcttcgtgatgtttgcattcaactcacagtgctgaacctttctttgatagtgcagctttgaaacactctttttgtagaaactgcaagtggatgtttggtcctctctgaggatttcgttggaaacgggataaaccgcacagaactaaaacagaagcattcacagaaaactcttggtgacgactgagtttaactcacagagctgaacattcctttggatggagcagtttcgaaacacactatttgtagaatctgcaagtggatatttgggcctctctgaggatttcgttggaaacgggataaaacgcacagaactaaaacagaagcattctcagaaactactttgtgattattgcattcaagtcacagagttgaacattccctttgacagagcagtttggaaactctctttgtgtagaatctgcaagtggagatatggaccgctttgaggcctatggtagtaaaggaaatagcttcatataaaagctagacagtagcattctcagaaacttctttgtgatgcttgcattcaactcacagagttgaactttcctttcgagagagaagctttgaaacactctttttccagaatgtgcaagtggacatttggggagctttgaggcctgtggaggaaaaggaattatcttcccgtaaaagctagatagaagcattgtcagaaacttctttgtgatgattgcattcaactcacagagttgaaggttccttttcaaacagcagtttccaatcactctttctgtggaatctgcaagtggatatttcgacctctttgaagatttcgttggaaacgggagaatcttcacagaaaagctcaacagaagcattctcagaaacttctctgtgatgtttgtgttcaactcccagagtttcacgttgcttttcatggagtagttctgaaacatgcttttcgtagtgtctgcaagtggacatttggagcgctttcaggcctgtggtggaaaacgaattatggtcacataaaaactggagagaagccttctcagaaacttctctgtgatgattgcattcaactcacagagttgaaccctcctctggatagagcagtgttgaaactctctttttgtggaatctgcaagcggatatgtggacctctccgaagatgtctttggaaacgggaatatcttcacataaaaactaaacagaagcattctcagaaacttcttggtgatgtttgcattcaaatcccagagttgaaccatcctttgagagttcaggtttgaaacactctttttgtaggatctgcaagtggatatttggaccactctgtggccttcgttcgaaacgggtacatcttcgcataaaatctagacagaagcattctcagaaaatactttgtgatgattgagttgaactcacagagctgaacattcctttggatggagcaggtttgagacacacttcttgtagaatctacaagtggatatttggacctctctgagggtttcgttggaaacgggataactgcacctaactaaacggaagcattctcagaaactgctttgtgatgattgcattcacctcacagagttgaacattcctattgatagagcagtttggaaacactcttgttgtggaatgtgcaagtggagatttggagcgctttgaggactatggtagtaaagggaatagcttcatagaaaaactagacagatgcattctcaggaactttttggtaatgtttgtattcaactcccagagttgaactttcctttggaaagagcagctatgaaacactctttttctagaatctgcaagtggacgtttggagggctttgtggtttgtggtggaaaaggaaatatcttcacctaaatcctagagagaagcatcctcagaagcttctctgtgatgactgcattcaactcacggagttgaacactccttttgagagcgcagttttgaaactctctttctgtggcatctgcaaggggacatgtagacctctttgaagatttcgttggaaacggaatcatcttcacataaaaactacacagaagcagtctcagaatcttctttgtgatgtttgcattcaaatccccgagttgaactttcctttcaaagttcacgtttgaaacactctttttgcaggatctacaagtggatatttggaccactctgtgtccttcgatcgaaacgggtatatcttcacatgacatctagacagaagctttctcagaaaattctttgggatgattgagttgaactcacagagctgagcattccttgcgatgtagcagtttagaaacacactttctgcagaatctgcaagtgcatatttggacctctgtgaggaattcgttggaaacgggataatttcagctgactaaacagaagcattctcagaaccttcttcgtgatgtctgcattcaactcacagtgtggaacctttctttgatagttcaggtttgaaacactctttttgtagaaactgcaaggggataattgcactctttgaggagtaccgtagtaaaggaaataacttcctataaaaagaagacagaagcattctcagaaccctcttcgtgatgtttgcattcaactcacagtgctgaacctttctttgatagttcagctttgaaacactctttttgtagaaactgcaagtggatatttggtcctctctgaggaattcgttggaaacgggataaactgcacagaactaaacagaagcattctcagaaccttcttcgtgatgtttgcattcaactcacagtgttgaacctttctttgatagttcaggtttgaaacggtctttctgcagaaactgcaagtagatatttggaccgctctgaggatttcgttggaaacgggataacccgcacagaactaaaacagaagcattcacagaaaactcttggtgacgactgagtttaactcacagagctgaacattcctttggatggagcagtttcgaaacacactatttgtagaatctgcaagtggatatttgggcctctcttaggatttcgattgaaacgggataaaccgcacagaactaaaacagaagcattctgagaaactactttgtgatgattgcattcaagtcacagagctgaacattccctttcacagagcagtttggaaactctctttgtgtagaatctgcaagtggagatatggaatgctttgaggactatggtagtaaaggaaatagcttcatataaatgctagacagtagcattctcagaaacttctttgtgatgcttgcattcaactcacagagttgaactttcccttcgagagagaagctttgaaacactctttttccagaatctgcaagtggacatttggagggctttgaggcctgtggtggaaaaggaattatcttcccataaaagctggatagaagcattgtcagaaacttctttgtgatgattgcattcaactcacagagttgaaggttccttttcaaagagcagtttccaatcactctttgtgtggaatctgcaagtggatatttggacctattttgaagatttcgttggaaacgggagaatcttcacaggaaagctaaacagaagcattctcagaaacttctctgtgatgtttgtgttcaactcccagagtttcacattgcttctcatagagtagttctgaaacatgcttttcgtagtgtctgcaagtggacatttggagcgctttcaggcctgtggtggaaaacgaattatggtcacagaaaaactggagagaagccttctcagaaatttctctgtgatgattgcattcaactcacagagttgaaccctcctatggatagagcagtgttgaaactctctttttgtggaatctgcaagcggatatgtggacctctccgaagatgtctttggaaacgggaatatcttcacataaaaactaaacggaagcattctcagaaacttcttggtgatgtttgcattcaaatcccagagttgaaccttcctttgatagttcaggtttgaaacactctttttgtaggatctgcaattggctatttagaccactctgtggccttcgttcgaaacgggtatatcttcgcataaaatctagacagaagcattctcagaaaatactttgtgatgattgagttgaactcacagagctgaacattcctttggatggagcaggtttgagacacactttttgtagaatctacaagtggatatttggacctctctgaggatttcgttggaaacgggataactgcacctaactaaacggaagcattctcagaaactgctttgtgatgattgcattcacctcacagagttgaacattcctattgatagagcagtttggaaacactcttgttgtggaatgtgcaagtggagatttggagcgctttgaggcctatggtagtaaagggaatagcttcatagaaaaactagacagatgcattctcaggaactttttggtgatgtttgtattcaactcccagagttgaactttcctttggaaagagcagctatgaaacactctttttctagaatctgcaagtggacgtttggagggctttgtggtttgtggtggaaaaggaaatatcttcacctaaatactagagagaagcattctcagaagcttctctgtgatgactgcattcaactcacggagttgaacactccttttgagagcgcagttttgaaactctctttctgtggcatccgcaaggggacatgtagacctctttgaagatttcgttggaaacggaatcatcttcacataaaaactatacagaagcagtctcagaatcttctttgtgatgtttgcattcaaatcccagagttgaactttcctttcaaagttcacgtttgaaacactgtttttgcaggatctacaagtggatatttggacctctctgtgtccttcgttcgaaacgggtatatcttcacatgacatctagacagaagctttctcagaaaattctttgggatgattgagttgagcaaacagagctgaacactccttgcgatgtagcagtttaggaacacactttctgcagaatctgcaagtgcatatgtggacctctctgagaaattcgttggaaacgggataatttcagctgactaaacagaagcattctcagaaccttcttcgtgatgtctgcattcaactcacagtgtggaacctttcgttgatagttcaggtttgaaacactctttttgtggaaactgcaaggggataattgcacttctttgaggcctaccgtagtaaaggaaataacttcctataaaaagaagacagaagcattctcagaaccctcttcgtgatgtttacattcaactcacagtgctgaacctttctttgatagttcagctttgaaacactctttttgtagaaactgcaagtggatatttggtgctctctgaggatttcgttggaaacgggataaaccgcacagaactaaacagaagaattctcagagccctcttcgtgatgtttgcattcaactcacagtgctgaacctttctttgatagtgcagctttgaaacactctttttgtagaaactgcaagtggatgtttggtcctctctgaggatttcgttggaaacgggataaaccgcacagaactaaaacagatagcattcacagtaaaactcttggtgacgactgagtttaactcacagagctgaacattcctttggatggagcagtttcgaaacacactatttgtagaatctgcaagtggatatttgggcctctctgaggatttcgttggaaacgggataaaacgcacagaactaaaacagaagcattctcagaaactactttgtgatgattgcattcaagacacagagttgaacattccctttgacagagcagtttggaaactctctttgtgtagaatctgcaagtggagatatggaccgctttgaggcctatggtagtaaaggaaatagcttcatataaaagctagacagtagcattctcagaaacttctttgtgatgcttgcattcaactcacagagttgaactttcctttcgagagagaagctttgaaacactctttttccagaatctgcaagtggacatttggagggctttgaggcctgtggtggaaaaggaattatcttcccgtaaaagcctagatagaagcattgtcagaaacttctttgtgatgattgcattcaagtcacagagttgaaggttccttttcaaacagcagtttccaaacactctttctgtggaatctgcaagtggatatttggacctctttgaagatttcgttggaaacgggagaatcttcacagaaaagctaaacagaagcattctcagaaacttctctgtgatgtttgtgttcaactcccagagtttcacgttgcttttcatagagtagttctgaaacatgcttttcgtagtgtctgcaagtggacatttggagcgctttcaggcctgtggtggaaaacgaattatggtcacataaaaactggagagaagccttctcagaaacttctctgtgatgattgcattcaactcacagagttgaaccctcctatggatagagcattgttgaaactctctttttgtggaatctgcaattggatatgtggacctctccgaagatgtctttggaaacgggaatatcttcacataaaaactaaacagaagcattctcagaaacttcttggtgatgtttgcattcaaatcccagagttgaagcttcctttgatagttcaggtttgaaacactctttttgtaggatctgcaagtggatatttggaccactctgtggccttcgttcgaaacgggtacatcttcacataaaatctagacagaagcattctcagaaaatactttgtgatgattgagtttaactcacagagctgaacattcctttggatggagcaggttcgagacacactttttgtagaatccacaagtggatatttggtcctctctgaggatttcgttggaaacgggataactgcaccgaactaaacggaagcattctcagaaactgctttgtgatgattgcattcacctcacagagttgaacattcctattgatagagcagtttggaaacactcttgttgtggaatgtgcaagtggagatttggagcgctttgaggcctgtggaagtaaagggaatagcttcatagaaaaactagacagatgcattctcaggaactttttggtgatgtttgtattcaactcccagagttgaactttcctttggaaagagcagctatgaaacactctttttctagaatctgcaagtggacgtttggagggctttgtggtttgtggtggaaaaggaaatatcttcacctaaatactagacagaagcattctcagaagcttctctgtgatgactgcattcaactcacggagttgaacactcctattgagagcgcagttttgaaactctctttctgtggcatctgcaagggaacatgtagacctctttgaagatttcgttggaaacggaatcatcttcacataaaaactatacagaagcagtctcagaatcttctttgtgatgtttgcattcaaatcccagagttgaactttcctttcaaagttcacgtttgaaacactctttttgcaacatctacaagtggatatttggaccactctgtgtccttcgttcgaaacgggtatatcttcacatgacatctagacagaagctttctcagaaaattctttgggatgattgagttgaactcacagagctgaacattccttgcgatgtagcagtttagaaacacagtttctgcagaatctgcaagtgcatatttggacctctcctgaggaattcgttggaaacgggataatttcagctgactaaacagaagcattctcagaaccttcttcgtgatgtctgcattgaactcacagtgtggaacctttctttgatagttcaggtttgaaacactctttttgtagaaactgcaaggggatcattgcacttctttgaggcctaccgtagtaaaggaaataacttcctataaaaagaagacagaagaattctcagagccctcttcgtgatgtttgcattcaactcacagtgctgaacctttctttgatagttcagctttgaaacactcttcttgtagaaactgcaagtggatatttggtcctctctgaggatttcgttggaaacgggataaaccgcacagaactaaacagaagcattgtcagaaacttctttgtgatgattgcattcaactcacagagttgaaggttccttttcaaacagcagtttccaatcactctttctgtggaatctgcaagtggatatttgggcctctctgaggatttcgttggaaacgggataaaacgcacagaactaaaacagaagcattctcagaaacttctctgtgatgtttgtgttcaactcccagagtttcacgttgcttttcatagagtagttctgaaacatgcttttcgtagtgtctgcaagtggacatttggagcgctttcaggcctgtggtggaaaacgaattatggtcacataaaaactggagagaagccttctcataaacttctctgtgatgattgcattcaactcacagagttgaaccctcctacggatagagcagtgttgaaactctctttttgtggaatctgcaagtggatatgtggacctctccgaagatgtctttggaaacgggaatatcttcacataaaaactaaacagaagcattctcagaaacttcttgttgatgtttgcattcaaatcccagagttgaaccttcctttgatagttcaggtttgaaacactctttttgtaggatctgcaagtggatatttggaccactctgtggccttcgttcgaaacgggtatatcttcgcataaaatctagacagaagcattctcagaaaatactttgtgatgattgagtttaactcacagagctgaaaattcctttggatggagcaggtttgagacacactttttgtagaatctacaagtggatatttggacctctccgaggatttcattggaaacgggataactgcacttaactaaacggaagcattctcagaaactgctttgtgatgattgcattcacctcacagagttgaacattcctattgatagagcagtttggaaacactcttgttgtggaatgtgcaagtggagatttggagcgctttgaggcctatggtagtaaagggaatagcttcatagaaaaactagacagaagcgttctcaggaactccttgatgttgtttgtattcaacttccagagttgaactttccttcggaaagagcagctatgaaacactctttttctagaatctgcaagtggacatgaggagggctttgaggtctgtggtggaaaaggtaatatcttcacataaatattagatagaagccttctcagaaacttttctgtgatgactgcattcaactcacagagttgaagactccttttgagagcgcagttttgaaactctctttctgtggaatctgcaaggggacatgtagacctctttgaaggttttgttggaaacagaatcatcttcacataaaaattacacagaagcagtctcagaatcttctttgtgatgtttcgcattcaaatcccagagttgaactttcctttccaagttcacgtttgaaacactctttttgcaggatctacaagtggatatttggaccactctgtgtccttcgttcgaaacgggtatatcttcacatgacatctagacagaagctttctcagaaaattctttgggatgattgagttgaactcacagagctgagcattccttgcgatgtagcagtttagaaacacactttctgcagaatctgcaagtgcatatttggacctctgtgaggaattcgttggaaacgggataatttcagctgactaaacagaagcattctcagaaccttcttcgtgatgtctgcattcaactcacagtgtggaacctttctttgatagttcaggtttgaaacactctttttgtagaaactgcaaggggataattgcactctttgaggagtaccgtagtaaaggaaataacttcctataaaaagaagacagaagcattctcagtaaccctcttcgtgatgtttgcattcaactcacagtgctgaacctttctttgatagttcagctttgaaacactctttttgtagaaactgcaagtggatatttggtcctctctgaggatttcgttggaaacgggataaactgcacagaactaaacagaagcattctcagaacccttttcgtgatgtttgcattcaactcacagtgctgaacctttctttgatagttcagctttgaaacactctttttgtagaaactgcaagtggatatttggtcctctctgaggatttcgttggaaacggcataaaccgcacagaactaaacagaagcattcacagaaaactcttggtgacgactgagtttaactcacagagctgaacattcctttggatggagcagtttcgaaacacactatttgtagaatctgcaagtggatatgtgggcctctctgaggatttcgttcgaaacgggataaaccgcacagaactaaaacagaagcattctcagaaactactttgtgatgattgcattcaagtcacagagttgaacattccctttgacagagcagtttggaaactctctttgtgtagaatctgcaagtggagatatggaccgctttgaggcctatggtagtaaaggaaatagcttcatataaaagctagacagtagcattctcagaaacttctttgtgatgcttgcattcaactcacagagttgaactttcctttcgagagagaagctttgaaacactctttttccagaatctgcaagtggacatttggagggctttgaggcctgtggtggaaaaggaattaacttcccgtaaaagctagatagaagcattgtcagaaacttctttgtgatgattgcattcaactcacagagatgaaggttcctttacaaacagcagtttccaaacactctttctgtggaatctgcaagtggatatttggacctctttgaagatttcgttgtaaacgggagaatcttcacagaaaagctaaacagaagcattctcagaaacttctctgtgatgtttgtgttcaactcccagagtttcacattgcttttcatagagtagttctgaaacatgcttttcgtagtgtctgcaagtggacatttggagcgctttcaggcctgtggtggaaaacgaattatggtcccataaaaactggagagaagccttctcagaaacttctctgtgatgattgcattcaactcacagatttgaaccctcctatggatagagcattgttgaaactctctttttgtggaatctgcaagtggatatgtggacctctccgaagatgtctttggaaacgggaatatcttcacataaaaactaaacagaagcattctcagaaacttcttggtgatgtttgcattcaaatcccagagttgaaccttcctgtgatagttcaggtttgaaacactctttttgtaggatctgcaagtggatatttggaccactctgtggccttcgttcgaaacgggtacatcttcacataaaatctagacagaagcattctcagaaaatactttgtgatgattgagtttaactcacagagctgaacattcctttggatggagcaggtttgagacacactttttgtagaatctacaagtggatatttggacctctctgaggatttcgttggaaacgcgataactgcacctaactaaacggaagcattctcagaaactgctttgtgatgattgcattcacctcacagagttgaacattcctattgatagagcagtttggaaacactcttgttgtggaatgtgcaagtggagatttggagcgctttgaggtctatggtagtaaagggaatagcttcatagaaaaactagacagatgcattctcaggaactttttggtgatgtttgtattcaactcccagatttgaactttcctttggaaagagcagctatgaaacactctttttctagaatctgcaagtggacgtttggagggctttgtggtttgtggtggaaaaggaaatatcttcacctaaatactagatagaaagcattctcagtaagcttctctgtgatgactgcattcaactcacggagttgaacactccttttgagagcgcagttttgaaactctctttctgtggcatctgcaaggggacatgtagacctctttgaagatttcgttggaaacggaatcatcttcacataaaaactatacagaagcagtctcagaatcttctttgtgatgtttgcattcaaatcccagagttgaactttcctttcaaagttcacgtttgaaacactctttttgcaggatctacaagtggatatttggaccactctgtgtccttcgttcgaaacgggtatatcttcacatgacatctagacagaagctttctcagaaaattctttgtgatgattgagttgagcaaacagagctgaacactccttgcgatgtagcagtttagaaacaccctttctgcagaatctgcaagtgcatatgtggacctctctgaggaattcgttggaaacgggataatttcagctgactaaacagaagcattctcagaaccttcttcgtgatgtctgcattcaactcacagtgtggaacctttctttgatagttcagctttgaaacactctttttgtagaaactgtaaggggattattgcacttctttgaggcctaccgtagtaaaggaaattacttcctataaaaagaagacagaagcattctcagaaccctcttcgtgatgtctgcattcaactcacagtgctgaacctttctttgatagttcagctttgaaacactctttttgtagaaactgcaaatggatatttggtcctctctgaggatttcgttggaaaagggataaaacgcacagaactaaacagaagaattctcagagccctcttcgtgatgtttgcattcaactcacagtgctgaacctttctttgatagtgcagctttgaaacactctttttgtagaaactgcaagtggatgtttggtcctctctgaggatttcgttggaaacgggataaaccgcacagaactaaaacagaagcattgtcagaaacttctttgtgatgattgcattcaactcacagagttgaaggttccttttcaaacagcagtttccaatcactctttctgtggaatctgcaagtggatatttgggcctctctgaggatttcgttggaaacgggataaaacgcacagaactaaaacagaagcattctcagaaacttctctgtgatgtttgtgttcaactctcagagtttcacattgcttctcatagagtagttctgaaacatgcttttcgtagtgtctgcaagtggacatttggagcgctttcaggcctgtggtggaaaacgaattatggtcacataaaaactggagagaagccttctgagcaaacttctctgtgatgattgcattcaactcacagagttgaaccctcctatggatagagcagtgttgaaactctctttttgtggaatctgcaagtgtatatgtggacctctccgaagatgtctttggaaacgggactatcttcacataaaaactaaacagaagcattctcagaaaattcttggtgatgtttgcaatcaaatcccagagttgaaccttcctttgatagttcaggtttgaaacactctttttgtaggatctgcaagtggatatttggaccactctgtggccttcgttcgaaacgggtacatcttcgcataaaatctagacagaagcattctcagaaaatactttgtgatgattgagtttaactcacagagctgaacattcctttggatggagcaggtttgagacacactttttgtagaatctacaagtggatatttcgacctttctgaggattttgttggaaacgggttaactgcacctaactaaacggaagcattctcagaaactgctttgtgatgattgcattcacctcacagagttgaacattcctattgatagagcagtttggaaacactcttgttgtggaatgtgcaagtggagatttggagcgctttgaggcctatggtagtaaagggaatagcttcatagaaaaactagacagatgcattctcaggaaccttttggtgatgtttgtattcaactcccagagttgaactttcctttggaaagagcagctatgaaacactctttttctagaatctgcaagtggacgtttggagggctttgtggtttgtggtggaaaaggaaatatcttcacctaaatactagacagaagcattctcagaagcttctctgtgatgactacattcaactcacggagttgaacactccttttgagagcgcagttttgaaactctctttctgtggcatctgcaaggggacatgtagacctctttgaagatttcgttggaaacggaatcatcttcacatcaaaactatacagaagcagtctcagaatcttctttgtgatgtttgcattcaaatcccagagttgaactttcctttcaaagttcacgtttgaaacactctttttgcaggatctacaagtggatatttggaccactctgtgtccttcgttcgaaacgggtatatcttcacacgacatctagacagaagcattcacagaaaactcttggtgacgactgagtttaactcacagagctgaacattcctttggatggagcagtttagaaacacactttctgcagaatctgcaagtgcatatttggacctctctgaggaattcgttggaaacgggataatatcagctgactaaacagaagcattctcagaacgttcttcgtgatgtctgcattcaactcacagtgtggaacctttctttgatagttcaggtttgaaacactctttttgtagaaactgcaaggggataattgcacttctttgaggcctaccgtagtaaaggaaataacttcctatagaaagaagacagaagcattctcagaaccctcttcgtgatgtttgcattcaactcacagtgctgaacctttctttgatagttcagctttgaaacactctttttgtagaaactgcaaatggatatttggtcctctctgaggatttcgttggaaaagggataaaacgcacagaacgaaacagaagaattctcagagccctcttcgtgatgtttgcattcaactcacagtgctgaacctttctttgatagtgcagctttgaaacactctttttgtagaaactgcaagtggatgtttggtcctctctgaggatttcgttggaaacgggataaaccgcacagaactaaaacagaagcattgtcagaaacttctttgtgatgattgcattcaactcacagagttgaaggttccttttcaaacagcagtttccaatcactctttctgtggaatctgcaagtggatatttgggcctctctgaggatttcgttggaaacgggataaaacgcacagaactaaaacagaagcattctcagaaacttctctgtgatgtttgtgttcaactcccagagtttcacgttgcttttcatagagtagttctgaaacatgcttttcgtagtgtctgcaagtggacatttggagcgctttcaggcctgtggtggaaaacgaattatggtcacataaaaactggagagaagccttctcagaaacttctctgtgatgattgcattcaactcacagagttgaaccctcctatggatagagcagtgttgaaactctctttttgtgttttctgcaagtggatatgtggacctctccgaagatgtctttggaaacgggaatatcttcacataaaaactaaacagaagcattctcagaaagttcttggtgatgtttgcattcaaatcccagagctgaaccttcctttgatagttcaggtttgaaacactgtttttgtaggatctgcaagtgggtatttggaccactctgtggccttcgttcgaaacgggtatatcttcatataaaatctagacagaagcattctcagaaaatattttgtgatgattgagttgaactcacagagctgaacattcctttggatggagcaggtttgagacacactttttgtagaatctacaggtggatatttggacctctctgaagatttcgttggaaacgggataactgcacctaactaaacggaagcattgtcagaaactgctttgtgatgattgcattcacctcacagagttgaacattcctattgatagagcagtttggaaacactcttgttgtggaatgtgcaagtggagatttggagcgctttgaggcctatggtagtaaagggaatagcttcatagaaaaactagacagatgcattctcaggaactttttggtgatgtttgtattcaactcccagagttgaactttcctttgaaaagagcagctatgaaacactctttttctagaatctgcaagtggacgtttggaggtcttttttggtttgttgtggaaaaggaaatatcttcacctaaatactagatagaagcattctcagaagcttctctgtgatgactgcattcaactcacggagttgaacactccttttgagagcgcaattttgaaactctctttctgtggcatccgcaaggggacatgtagacctctttgaagatttcgttggaaacggaatcatcttcacataaaaactatacagaagcagtctcagaatcttctttgtgatgtttgcattcaaatcccagagttgaactttcctttcaaagttcacgtttgaaacactctttttgcaggatctacaagtggatatttggaccactctgtgtccttcgttcgaaacgggtatatcttcacacgacatctagacagaagctttctcagaaaattctttgggatgattgagtggaactcacagagctgaacattccttgcgatgtagcagtttagaaacacaccttctgcagaacctgcaagtgcatatttggacctctctgaggaattcgttggaaacgggataatttcagctgactaaacagaagcattctcagaaccctcttcgtgatgtttgcattcaactcacagtgctgaacctttccttgatagttcagctttgaaacactctttttgtagaaactgcaaggggataattgcacttctttgaggcctaccgtagtaaaggaaataacttcctatagaaagaagacagaagcattctcagaaccctcttcgtgatgtttgcattcaactcacagtgctgaacctttctttgatagttcagctttgaaacactctttttgtagaaactgcaagtggatatttggtcctctctgaggatttcgttggaaacgggataaaatacacagaactaaacagaagcattctcagaaccttcttcgtgatgtttgcattcaactcacagtgtttaacctttctttgatagttcaggttggaaacggtctttctgtagaaactgcaagtagatatttggacctctctgaggatttcgttggaaacgggataaaccgcacagaactaaaacagaagcattcacagaaaactcttggtgacgactgagtttaactcacagagctgaacattcctttggatggagcagtttcgaaacacactatttgtagaatctgcaagtggatatttgggcctgtctgaggatttcgttggaaacgggataaaccgctcagaactaaagagaagcattctcagaagctactttgtgatgattgcattcaagtcacagagttgaacattccctttgacagagcagtttggaaactctctttgtgtagaatctgcaagtggagatatggaccgctttgaggcctatggtagtaaaggaaatagcttcatataaaagctagacagtagcattctcagaaacttctttgtgatgcttgcattcaactcacagagttgaactttcctttcgagagagaagctttgaaacactctttttccagaatctgcaagtggacatttggagggctttgaggcctgtggtggaaaaggaattatcttcccgtaaaagctagatagaagcattgtcagaaacttctttgtgatgattgcattcaactcacagagttgaaggttccttttcaaagagcagtttccaatcactctttctgtggaatctgcaagtggatatttcgacctattttgaagatttcattggaaacgggagaatcttcacagaaaagctaaacagaagcattctcagaaacttctctgtgatgtttgtgttcaactcccagagtttcacattgcttttcatagagtagttctgaaacatgcttttcgtagtgtctacaagtggacatttggagcgctttcaggcctgtggtggaaaacgaattatggtcacataaaaactggagagaagccttctcagaaacttctctgtgatgattgcattcaactcacagagttgaaccctcctatggatagagcagtgttgaaactctctttttgtggaatctgcaagtggatatgtggacctctccgaagatgtctttggaaacgggaatatcttcacataaaaactaaacagaaggattctcagaaacttcttggtgatgtttgcattcaaatcccagagttgaaccttcctttgatagttcaggtttgaaacactctttttgtaggatctgcaagtggctatttggaccactctgtggcattcgttcaaaacgggtatatcttcgcataaaatctagacagaagcattctcagaaaatactttgtgatgattgagttgaactcacagagctgaacattcctttggatggagcaggtttgagacacactttttgtagaatctacaagtggatatttggacctctctgaggatttcgttggaaacgggataactgcacctaactaaacggaagcattctcagaaactgctttgtgatgattgcattcacctcacagagttgaacattcctattgatagagcaggttggaaccactcttgttgtggaatgtgcaagtggagatttggagcgctttgaggcctatggtagtaaagggaatagcttcatagaaaaactagacagatgcattctcaggaaccttttggtgatgtttgtattcaactcccagagttgaactttcctttggaaagagcagctatgaaacactctttttctagaatctgcaagtggacgtttggagggctttgtggtttgtggtggaaaaggaaatatcttcacctaaatactagatagaagcattctcagaagcttctctgtgatgactgcattcaactcacggagttgaacactccttttgagagcgcagttttgaaactctctttctgtggcatctgcaaggggacatgtagacctctttgaagatttcgttggaaacggaatcatcttcacataaaaactatacagaagcagtctcagaatcttctttgtgatgtttgcattcaaatcccagagttgaactttcctttcaaagttcacgtttgaaacactctttttgcaggatctacaagtggatatttggaccactctgtgtccttcgttcgaaacgggtatatcttcacacgacatctagacagaagctttctcagaaaattctttgggatgattgagttgaactcacagagctgaacattccttgcgatgtagcagtttagaaacacactttctgcagaatctgaaagtgcatatttggacctctctgaggaattcgttggaaacgggataatttcagctgactaaacagaaacattctcagaaccttcttcgtgatgtctgcattcaactcacagtgtggaacctttctttgatagttcaggtttgaaacactctttttgtagagactgcaaggggataattgcacttctttgaggcctaccgtagtaaaggaaataacttcccataaaaagaagacagaagcattctcagaaccctcttcgtgatgtttgcattcaactcacactgctgaacctttctttgatagttcagctttcaaacactctttttgtagaaactgcaagtggatatttggtcctctctgaggatttcgttggaaacgggataaaccgcacagaactaaacagaagcattctcaaatccttcttcgtgatgtttgcattcaactcacagtgttgaacctttctttgatagttcaggtttgaaacggtctttctgtagaaactgcaagtagatattttgacctctctgaggatttcattggaaacgggataaaccgcacagaactaaaacagaagcattcacagaaaactcttggtgacgactgagtttaactcacggagctgaacattcctttggagggagcaggttcgaaacacagtatttgtagaatgtgcaactggatattagggcctctctgaggatttcgttggaaacgggataaacggcacagaaataaacagaagcattttcagaaactactttgtgatgattgcattcaagtcacagagctgaacattccctttgacagagcagtttggaaactctctttgtgtagaatctgcaagtggagatatggaccgctttgaggcctatggtagtaaaggaaatagcttcatataaaagctagacagtagcattctcagaaacttctttgtgatgcttgcattcaactcacagagttgaactttcctttcgagagagaagctttgaaacactctttttccagaatgtgcaagtggacatttggggagctttgaggcctgtggtggaaaaggaattatcttcccgtaaaagctagatagaagcattgtcagaaacttcttcgtgatgattgcattcaactcacagagttgaaggttccttttcaaacagcagtttccaaacactctttctgtggaatctgcaagtggatgtttggacctctttgaagatttcgttggaaacgggagaatcttcacagaaaagctaaacagaagctttctcagaaacttctctgtgatgtctgtgttcaactcccagagtttcacattgcttttcatagagtagttctgaaacatgcttttcgtagtgtctgcaagtggacgtttggagcgctttcaggcctgcggtggaaaacgaattatggtcacataaaaactggagagaagccttctgagaaacttctctgtgatgattgcattcatctcacagagttgaaccctccaatggatagagcagtgttgaaactctctttttgtggaatctgcaagtggatatgtggacctcgccgaagatgtctttggaaacgggaatatcttcacataaaaactaaacagaagcattctcagaaacttcctggtgatgtttgcattcaaatcccagagttgaaccttcctttgatagttcaggtttgaaacactctttttgtaggatgtgcaagtggatatttggaccactctgtggccttcgttcaaaacgggtacatcttcgcataatatctagacagaagcattctcagaaaatactttgtgatgattgagtttaaatcacagagctgaccattcctttggatggagcaggtttgagacacactttttgtagaatctacaagtggatatttggacctctctgaggatttcgttggaaacgggataactgcacctaactaaacggaagcattctcagaaactgctttgtgatgattgcattcacctcacagagttgaacattcctattgatagagcagtttggaaacactcttgttgtggaatgtgcaagtggagatttggagcgctttgaggcctgtggtagtaaagggaatagcttcatagaaaaactagacagatgcattctcatggaacatctttttggtgatgtttgtattcaactcccagagttgaactttcctttggaaagagcagctatgaaacactctttttctagaatctgcaagtggacgtttggagggctttgtggtttgtggtggaaaaggaaatatcttcacctaaatactagatagaggcatcctcagaagcttctctgtgatgactgcattcaactcacggagttgaacactccttttgagagcgcagttttgaaactctctttctgtggcatctgcaaggggacatgtagacctctttgaagatttcgttggaaacggaatcatcttcacataaaaactatacagaagcagtctcagaatcttctttgtgatgtttgcattcaaatcccagagttgaactttcctttcaaagttcacgtttgaaacactctttttgcaggatctacaagtggatatttggaccactctgtgtccttcgttcgaaacgggtatatcttcacatgacatctagacagaagctttctcagaaaattctttgggatgattgagtggaattcacagagctgaacattccttgcgatgtagcagtttagaaacacactttctgcagaatctgcaagtgcatatttggacctctctgaggaattcgttggaaacgggataatttcagctgactaaacagaagcattctcagaaccttcttcctgatgtctgcattcaactcacagtgtggaacctttctttgatagttcaggtttgaaacactctttttgtagaaactgcaaggggataattgcacttctttgaggcctaccgtagtaaaggaagtatcttcctatagaaagaagacagaagcattctcagaaccttcttcgtgatgtttgcattcaactcacagtgttgaacctttctttgatagttcaggtttgaaacggtctttctgtagaaactgcaagtagatatttggacctctctgaggatatcgttggaaacgggataaaccgcacagaactaaacagaagcattcacagaaaactcttggtgacgaccgagtttaactcacagagctgaacattcctttgaatggagcagtttcgaaacacactatttgtagaatgtgcaagtggatatttgggcctctctgaggatttcgttggaaacgggataaaccgcacagaactaaacagaagcattctcagaaactactttgtgatgattgcattcaagtcacagagttgaacattccctttgacagagcagtttggaaaccctctttgtgtagaatctgcaagtggagatatggaccgctttgaggcctatggtagtaaaggaaatagattcatataaaagctagacagtagcattctcagaaacttctttgtgatgcttgcattcaactcacagagttgaaatttcctttcgagagagaagctttgaaacactctttttccagaatgttcaagtggatatttgcagggctttgaggcctgtggtggaaaaggaattatcttcccgtaaaagctagatagaagcattgtcagaaacttctttgtgatgattgcattcaactcacagagttgaaggttccttttcaaacagcagtttccaatcactctttctgtggaatctgcaagtggatatttcgacctctttgaagatttcgttggaaacgggagaatcttcacagaaaagctaaacagaagcattctcagaaacttctctgtgatgtttgtgttcaactcccagagtttcacattgcttttcatagagtagttctgaaacatgcttttcgtagtgtctgcaagtggacatttggagcgctttcaggcctgtggtggaaaacgaattatggtcacataaaaactggagagaagccttctcagaaacttctctgtgatgattgcattcaactcacagagttgaacgctcctatggatagagcagtgttgaaactctctttttgtggaatctgcaagtggatatgtggacctctccgaagatgtctttggaaacggtaatatcttcacataataactaaacagaagcattctcagaaacttcttggtgatgtttgcattcaaatcccagagttgaaccttcctttgatagttcaggtttgaaacactctttttgtaggatctgcaagtggatatttggaccactctgtggccttcgttcgaaacgggtacatcttcgcataaaatctagacagaagcattctcagaaaatactttgtgatgattgagttaaaatcacagagctgaacattcctttggatggagcaggtttgagacacactttttgtagaatctacaagtggatatttggacctctctgaggatttcgttggaaacgggataactgcacctaactaaacggaaagcattctcagaaactgctttgtgatgattgcattcacctcacagagttgaacattcctattgatagagcagtttggaaacactcttgttgtggaatgtgcaagtggagatttggagcgctttgaggcctatggtagtaaagggaatagcttcatagaaaaactagacagtgcattctcaggaactttttggtgatgtttgcattcaactcccagagttgaactttcctttggaaagagcagctatgaaacattctttttctagaatctgcaagtggacgtttggagggctttgtggtttgtggtggaaaaggaaatatcttcacctaaatactagatagaagcattctcagaagcttctctgtgatgactgcattcaactcacggagttgaacactccttttgagagcgcagttttgaaactctctttctgtggcatctgcaaggggacatgtagacctctttgaagatttcgttggaaacggaatcatcttcacataaaaactatacagaagcagtctcagaatcttctttgtgatgtttgcattcaaatcccagagttgaactttcctttcaaagttcgcgtttgaaacactctttttgcaggatctacaagtggatatttggaccactctgtgtccttcgttcgaaacagttataccttcacatgacatctagacagaagctttctcagaaaattctttgggatgattgagttgaactcacagagctgagcattccttgcgatgtagcagtttagaaacacactttctgcagaatctgcaagtgcatatttggacctctctgagaaattcgttggaaacgggataatttcagctgactaaacagaggcattctcagaaccttcttcttgatgtctgcattcaactcacagtgtggaacctttctttgatagttcaggtttgaaacactctttttgtaggaactgcaaggggataattgcactctttgaggagtaccgtagtaaaggaaataacttcctataaaaagaagacagaagcattctcaaaaccctcttcatgatgtttgcattcaactcacagtgctgaaactttctttgatagttcagctttgaaacactctttttgtagaaactgcaagtggatatttggtcctctctgaggatttcgttggaaacgggataaaccgcacagaactaagcagaagcattctcagaacattcttcgtgatgtttgcattcaactcacagtgttgaacctttctgtgatagttcaggttggaaacggtctttctgtagaaactgcaagtagatatttggacctctctgaggatttcgttggaaacgggataaaccgcacagaactaaaacagaagcattcacagaaaactcttggtgatgactgagtttaactcacagagctgaacattcctttggatggagcagtttcgaaacacactatttgtagaatgtgcaagtggatatttgggcctctctgaggatttcgttggaaacgggataaaccgcacagaactaaacagaagcattctcagaaactactttgtgatgattgcattcaagtcacagagtttaacattccctttgacagagcagtttggaaactctctttgtgtagaatctgcaagtggagatatggaccgctttgaggcctatggtagtaaaggaaatagcttcatataaaagctagacagtagcattctcagaaacttctttgtgatgcttgcattcaactcacagagttgaactttcctttcgagagagaagctttgaaacactctttttccagaatctgcaagtgtagatttggagggctttgaggcctgtggtggaaaaggaattatcttcccgtaaaagctagatggaagcattgtcagaaacttctttgtgatgattgcattcaactcacagagttgaaggttccttttcaaacagcagtttccaatcactctttctgtggaatctgcaagtagatatttgggcctctctgaggatttcgttggaaacgggataaaacgcacagaactaaaacagaagcattctcagaaacttctctgtgatgtttgtgttcaactcccagagtttcacgttgcttttcatagagtagttctgaaacatgcttttcgtagtgtctgcaagtggacatttggagcgctttcaggcctgtggtggaaaacgaattatggtcacataaaaactggagagaagccttctcagaaacttctctgtgatgattgcattcaactcacagagttgaaccctcctatggatagagcagtgttgaaactctctttttgtggaatctgcaagtggatatgtggacctctccgaagatgtctttggaaacgggaatatcttcacataaaaactaaacagaagcattctcagaaacttcttggtgatgtttgcattcaaatcccagagttgaaccttcctttgatagttcaggtttgaaacactctttctgtaggatctgcaagtggctatttggaccactctgtggccttcgttcgaaacgggtatatcttcgcataaaatctagacagaagcattctcagaaaatactttgtgatgattgagtttaaatcacagagctgaccattcctttggatggagcaggtttgagacacactttttgtagaatctacaagtggatatttggacctctctgaggatttcgttggaaacgggataactgcacctaactaaacggaagcattctcagaaactgctttgtgatgattgcattcacctcacagagttgaacattcctattgatagagcagtttggaaacactcttgttgtggaatgtgcaagtggagatttggagcgctttgaggcctatggtagtaaagggaatagcttcatagaaaaactagacagatgcattctcaggaaccttttggtgatgtttgtattcaactcccagagttgaactttcctttggaaagagcagctatgaaacactctttttctagaatctgcaagtggacgtttggagggctttgtggtttgtggtggaaaaggaaatatcttcacctaaatactagatagaagcattctcagaagcttctctgtgatgactgcattcaactcacggagttgaacactccttttgagagcgcagttttgaaactctctttctgtggcatctgcaaggggacatgtagacctctttgaagatttcgttggaaacggaatcatcttcacataaaaactatacagaagcagtctcagaatcttctttgtgatgtttgcattcaaatcccagagttgaactttcctttcaaagttcacgtttgaaacactctttttgcaggatctacaagtggatatttggaccactctgtgtccttcgttcgaaacgggtatatcttcacacgacatctagacagaagctttctcagaaaattctttgggatgattgagtggaactcacagagctgaacattccttgcgatgtagcagtttagaaacacactttctgcagaatctgcaagtgcatatttggacctctctgaggaattcgttggaaacgggataatttcagctgactaaacagaagcattctcagagccttcttcgtgatgtctgcattcaactcacagtgtggaacctttctttgatagttcaggtttgaaacactctttttgtagaaactgcaaggggatcattgcacttctttgaggcctaccgtagtaaaggagataacttcctataaaaagaagacagaagcattctcagaaccttcttcgtgatgtttgcattcaactcacagtgttgaacctttctttgatagttcaggtttgaaacggtctttctgtagaaactgcaagtagatatttggacctctctgaggatttcgttggaaacgggataaaccgcacagaactaaacagaagcattcacagaaaactcttggtgacgactgagtttaactcacagagctgaacattcctttggatggagcagtttcgaaacacactctttgtagaatctgcaagtggatatttgggcctctctgaggatttcgttggaaacggaataaaccgcacagaactaaaacagaagcattctcagaaactactttgtgatgattgcattcaagtcacagagttgaacattccctttgacagagcagtttggaaactctctttgtgtagagtctgcaagtggagatatggaccgctttgaggcctatggtagtaaaggaaatggcttcatatgaaagctagacagtagcattctcagaaacttctttgtgatgcttgcattcaactcacagagttgaactttcctttcgagagagaagctttgaaacactctttttccagaatgtgcaagtggacatttggagggctttgaggcctgtggtggaaaaggaattatcttcccgtaaaagctagatagaagcattgtcagaaacttctttgtgatgattgcattcaactcacagagttgaaggttccttttcaaacagcagtttccaatcactctttctgtggaatctgcaagtggatatttcgacctctttgaagatttcgttggaaacgggagaaccttcacagaaaagctaaacagaagcattctcagaaacttctctgtgatgtttgtgttcaactcccagagtttcacgttgcttttcatagagtagttctgaaacatgcttttcgtagtgtctgcaagtggacatttggagcgctttcaggcctgtggtggaaaacgaattatggtcacataaaaactggagagaagccttctcagaaacttctctgtgatgattgcattcaactcacagagttgaaccctcctatggatagagcagtgttgaaactctgtttttgtggaatctgcaagtggatatgtggacctctccgaagatgtctttggaaacgggaatatcttcacataaaaactaaacagaagcattctcagaaacttcttggtgatgtttgcattcaaatcccagagttgaaccttcctttgatagttcaggtttgaaacactctttttgtaggatctgcaagtggctatttggaccactctgtggccttcgttcgaaacgggtatatcttcgcataaaatctagacagaagcattctcagaaaatactttgtgatgattgagttaaaatcacagagctgaacattcctttggatggagcaggtttgagacacactttttgtagaatctacaagtggatatttggacctctctgaggatttcgttggaaacgggataactgcacctaactaaacggaagcattctcagaaactgctttgtgatgattgcattcacctcacagagttgaacattcctattgatagagcagtttggaaacactcttgttgtggaatgtgcaagtggagatttggagcgctttgaggcctgtggtagtaaagggaatagcttcatagaaaaactagacagatgcattctcaggaactttttggtgatgtttgtattcaactcccagagttgaactttcctttggaaagagcagctatgaaacactctttttctagaatctgcaagtggacgtttggagggctttgtggtttgtggtggaaaaggaaatatcttcacctaaatactagatagaagcattctcagaagcttctctgtgatgactgcattcaactcacggagttgaacactccttttgagagcgcagttttgaaactctctttctgtggcatctgcaaggggacatgtagacctctttgaagatttcgttggaaacggaatcatcttcacataaaaactatacagaagcagtctcagaatcttctttgtgatgtttgcattcaaatcccagagttgaactttcctttcaaagttcacgtttgaaacactctttttgcaggatctacaagtggatatttggaccactctgtgtccttcgttcgaaacgggtatatcttcacacgacatctagacagaagctttctcagaaaattctttgggatgattgagtggaactcacagagctgaacattccttgcgatgtagcagtttagaaacacactttctgcagaatctgcaagtgcatatttggacctctctgaggaattcgttggaaacgggataatttcagctgactaaacagaagcattctcagaaccttcttcgtgatgtctgcattcaactcacagtgtggaacctttctttgatagttcaggtttgaaacactctatttgtggaaactgcaaggggataattgcacttctttgaggcccaccgtagtaatggaaataacttcctataaaaagaagacagaagcattctcaggaccctcttcgtgatgtttgcattcaactcacagtgctgaacctttctttgatagttcagctttgaaacactctttttgtagaaactgcaagaggatatttggtcctctctgaggatttcgttggaaacgggataaaccgcacagaactaaacagaagaattctcagagccctcttcgtgatgtttgcattcaactcacagtgctgaacctttctttgatagtgcagcttcgaaacactctttttgtagaaactgcaagtggatgtttggtcctctctgaggatttcgttggaaacgggataaaccgcacagaactaaaacagaagcattgtcagaaacttctttgtgatgattgcattcaactcacagagttgaaggttccttttcaaacagcagtttccaatcactctttctgtggaatctgcaagtggatatttgggcctctctgaggatttcgttggaaacgggataaaacgcacagaactaaaacagaagcattctcagaaacttctctgtgatgtttgtgttcaactcccagagtttcacgttgcttttcatagagtagttctgaaacatgcttttcgtagtgtctgcaagtggacatttggagcgctttcaggcctgtggtggaaaacgaattatggtcacataaaaactggagagaagccttctcagaaacttctctgtgatgattgcattcaactcacagagttgaaccctcctatggatagagcagtgttgaaactctctttttgtggaatctgcaagtggatatgtggacctctccgaagatgtctttggaaacgggaatatcttcacataaaaactaaacagaagcattctcagaaacttcttggtgatgtttgcattcaaatcccagagttgaaccttcctttgatagttcaggtttgaaacactctttctgtaggatctgcaagtggctatttggaccactctgtggccttcgttcgaaacgggtatatcttcgcataaaatctagacagaagcattctcagaaaatactttgtgatgattgagtttaactcacagagctgaacattcctttggatggagcaggtttgagacacactttttgtagaatctacaagtggatatttggacctctctgaggatttcgttggaaacgggataactgcacctaacaaaacggaagcattctcagaaactgctttgtgatgattgcattcacctcacagagttgaacattcctattgatagagcagtttggaaacactcttgttgtggaatgtgcaagtggagatttggagcgctttgaggcctatggtagtaaagggaatagcttaatagaaaaactagacagatgcattctcaggaactttttggtgatgtttgtattcaactcccagagttgaactttcctttggaaagagcagctatgaaacactttttgtagaatctgcaagtggacgtttggagggctttgtggtttgtggtggaaaaggaaatatcttcacctaaatactagatagaagcattctcagaagcttctctgtgatgactgcattcaactcacggagttgaacactccttttgagagtgcagttttgaaactctctttctgtggcatctgcaaggggacatgtagacctctctgaagatttcgttggaaacggaatcatcttcacataaaaactatacagaagcagtctcagaatcttctttgtgatgtttgcattcaaatcccagagttgaactttcgtttcaaagttcacgtttgaaacactctttttgcaggatctacaagtggatatttggaccactctgtgtccttcgttcgaaacgggtatatcttcacatgacatctagacagaagctttctcagaaaattctttgcgatgattgagttgaactcacagagctgaacattccttgcgatgtagcagtttagaaacacactttctgcagaatctgcaagtgcatatttggacctctctgaggaattcgttggaaacgggataatttcagctgactaaacagaagcattctcagaaccttcttcgtgatgtctgcattcaactcacagtgtggaacctttctttgatagttcaggtttgaaacactctttttgtagaaactgcaaggggataattgcacttctttgaggcctaccgtagtaaaggaaataacttcctataaaaagaagacagaagcattctcagaaccctcttcgtgatgtttgcattcaactcacagtgctgaacctttctttgatagttcagctttgaaacactctttttgtagaaactgcaagtggatatttggtcctctctgaggatttcgttggaaacgggataaaccgcacagaactaaacagaagcatcctcagaaccttcttcgtgatgtttgcattcaactcacagtgctgaacctttctttgatagttcagctttgaaacactctttttgtagaaactgcaagtggatatttggacctctctgaggatttcgttggaaacgggataaaccgcacagaactaaaacagaagcattcacagaaaacacttggtgacgactgcgtttaactcacagagctgaaaatccctttggatggagcagtttcgaaaaacactatttgtagaatgtgcaagtggatatttgggcctctctgaggatttcgttggaaacgggataaaccacacagaactaaacagaagcattctcagaaactacttcgtgatgattgcattgaagtcacagagttgaacattccctttgacagagcagtttggaaaatctctttgtgtagaatctgcaagtggagatatggaccgctttgaggactatggtagtaaaggaaatagcttcatataaaagctaaacagtagcattctcagaaacttctttgtgatgcttgcattcaactcacagagttgaactttcctttcgagagagaagctttgaaacactctttttccagaatctgcaagtggacatttggagggctttgaggcctgtggtggaaaaggaattatcttcccgtaaaagctagagagaagcattgtcagaaacttctttgtgatgattgcattcaactcacagagttgaaggttccttttcaaacagcagtttccaatcactctttctgtggaatctgcaagtggatatttggacctctttgaagatttcgttggaaacgggagaatcttcacagaaaagctaaacagaagcattctcagaaacttctctgtgatgtttgtgttcaactcccagagtttcacattgcttttcatagagtagttctgaaacatgcttttcgtagtgtctgcaagtggacatttggagcgctttcaggcctttggtggaaaacgaattatggtcacataaaaactggagagaagccttctcagaaacttctctgtgatgattgcattcaactcacagagttgaaccctcctatggatagagcagtgttgtaactctctttttgtggaatctgcaagcggatatgtggacctctccgaagatgtctttggaaacgggaatatcttcacataaaaactaaacagaagcattctcagaaacttcttggtgatgtttgcattcaaatcccagagttgaaccttcctttgagagttcaggtttgaaacactctttttgtaggatctgcaagtggatatttggaccactctgtggccttcgttcgaaacgggtacatcttcgcataaaatctagacagaagcattctcagaaaatactttgtgatgattgagtttaactcacagagctgaacattcctttggatggagcaggtttgagacacactttttgtagaatctacaagtggatatttggacctctctgaggatttcgttggaaacgggataactgcagctaactaaacggaagcattctcagaaactgcattgtgatgattgcattcacctcacagagttgaacattcctattgatagagcagtttggaaacactcttcttgtggaatgtgcaagtggagatttggagcgctttgaggcctatggtagtaaagggaatagcttcatagaaaaactagacagatgcattctcaggaactttttggtgatgtttgtattcaactcccaagagttgaactttcctttggaaagagcagctatgaaacactctttttctagaatctgcaagtggacgtttggagggctttgtggtttgtggtggaaaaggaaatatcttcacctaaatactagatagaagcattctcagaagcttctctgtgatgactgcattcaactcacggagttgaacactccttttgagagcgcagttttgaaactctctttctgtggcatccgcaaggggacatgtagacctgtttgaagatttctttggaaagggaatcatcttcacataaaaactatacagaagcagtctcagaatcttctttgtgatgtttgcattcaaatcccagagttgaactttcctttcaaagttcacgtttgaaacactctttttgcaggatctacaagtggatatttggaccactcctgtgtccttcgttcgaaacgggtatatcttcacacgacatctagacagaagctttctcagaaaattctttgggatgattgagtggaactcacagagctgaacattccttgcgatgtagcagtttagaaacacactttctgcagaatctgcaagtgcatatttggacctctctgaggaattcgttggaaacgggataatttcagctgactaaacagaagcattctcagaaccttcttcgtgatgtctgcattcaactcacagtgtggaacctttctttgatagttcaggtttgaaacactctttttgtagaaactgcaaggggataattgcacttctttgaggcctaccgtagtaaaggaaataacttcctatagaaagaagacagaagcattctcagaaccctcttcgtgatgtttgcattcaactcacagtgctgaacctttctttgatagttcagctttgaaacactcttcttgtagaaactgcaagtggatatttggtcctctctgaggatttcgttggaaacgggataaaccgcacagaactaaacagaagaattctcagagccctcttcgtgatgtttgcattcaactcacagtgctgaacctttctttgatagtgcagctttgaaacactctttttgtagaaactgcaagtggatgtttggtcctctctgaggatttcgttggaaacgggataaaccgcacagaactaaaacagaagcattgtcagaaacttctttgtgatgattgcattcaactcacagagttgaaggttccttttcaaacagcagtttccaatcactctttctgtggaatctgcaagtggatatttgggcctctctgaggatttcgttggaaacgggataaaacgcacagaactaaaacagaagcattctcagaaacttctctgtgatgtttgtgttcaactcccagagtttcacgttgcttttcatagagtagttctgaaacatgcttttcgtagtgtctgcaagtggacatttggagcgctttcaggcctgtggtggaaaacgaattatggtcacataaaaactggagagaagccttctcagaaacttctctgtgatgattgcattcaactcacagagttgaaccctcctatggatagagcagtgttgaaactctctttttgtggaatctgcaagtggatatgtggacctctccgaagatgtctttggaaacgggaatatcttcacataaaaactaaacagaagcattctcagaaacttcttggtgatgtttgcattcaaatcccagagttgaaccttcctttgatagttcaggtttgaaacactctttctgtaggatctgcaagtggctatttggaccactctgtggccttcgttcgaaacgggtatatcttcgcataaaatctagacagaaagcattctcagaaaatactttgtgatgattgagtttaaatcacagagctgaccattcctttggatggagcaggtttgagacacactttttgtagaatctacaagtggatatttggacctctctgaggatttcgttggaaacgggataactgcacctaactaaacggagcattctcagaaactgctttgtgatgattgcattcacctcacagagttgaacatttctattgatagagcagtttggaaacactcttgttgtggaatgtgcaagtggagatttggagcgcttcgaggcctatggtagtaaagggaatagcttcatagaaaaactagacagatgcattctcaggaactttttggtgatgtttgtattcaactcccagagttgaactttcctttggaaagagcagctatgaaacactgtttttctagaatctgcaagtggacgtttggagggctttgtggtttgtggtggaaaaggaaatatcttcacctaaatactagatagaagcatcctcagaagcttctctgtgatgactgcattcaactcacggagttgaacactccttttgagagcgcagttttgaaactctctttctgtggcatctgcaaggggacatgtagacctctttgaagatttcgttggaaacggaatcatcttcacataaaaactatacagaagcagtctcagaatcttctttgtgatgtttgcattcaaatccccgagttgaactttcctttcaaagttcacgtttgaaacactctttttgcaggatctacaagtggatatttggaccactctgtgtccttcgatcgaaacgggtatatcttcacatgacatctagacagaagctttctcagaaaattctttgggatgattgagttgaactcacagagctgagcattccttgcgatgtagcagtttagaaacacactttctgcagaatctgcaagtgcatatttggacctctgtgaggaattcgttggaaacgggataatttcagctgactaaacagaagcattctcagaaccttcttcgtgatgtctgcattcaactcacagtgtggaacctttctttgatagttcaggtttgaaacactctttttgtagaaactgcaaggggataattgcactctttgaggagtaccgtagtaaaggaaataacttcctataaaaagaagacagaagcattctcagaaccctcttcgtgatgtttgcattcaactcacagtgctgaacctgtctttgatagttcagctttgaaacactctttttgtagaaactgcaagtggatatttggtcctctctgagcatttcgttggaaacgggataaactgcacagaactaaacagaagcattctcagaaccttcttcgtgatgtttgcattcaactcacagtgttgaacctttctttgatagttcaggtttgaaacggtctttctgcagaaactgcaagtagatatttggaccgctctgaggatttcgttggaaacgggataacccgcacagaactaaaacagaagcattcacagaaaactcttggtgacgactgagtttaactcacagagctgaacattcctttggatggagcagtttcgaaacacactatttgtagaatgtgcaagtggatatttaggcctctctgaggatttcgttggaaacgggataaaccgcacagaactaaacagaagcattctcagaaactactttgtgatgattgcattcaagtcacagagttgaacattccctttgacagagcagtttggaaactctctttgtgtagaatctgcaagtggagatatggaccgctttgaggcctatggtagtaaaggaaatagcttcatataaaagctagacagtagcattctcagaaacttctttgtgatgcttgcattcaactcacagagttgaactttcctttcgagagagaagctttgaaacactctttttccagaatctgcaagtggacatttggagggctttgaggcctgtggtggaaaaggaattatcttcccgtaaaagctagatagaagcattgtcagaaacttctttgtgatgattgcattcaagtcacagagttgaaggttccttttcaaagagcagtttccaatcactctttctgtggaatctgcaagtggatatttggacctattttgaagatttcgttggaaacgggagaatcttcacagaaaagctaaacagaagcattctcagaaacttctctgtgatgtttgtgttcaactcccagagtttcacattgcttttcatagagtagttctgaaacatgcttttcgtagtgtctgcaagtggacatttggagcgctttcaggcctgtggtggaaaacgaattatggtcacataaaaactggagagaagccttctcagaaacttctctgtgatgattgcattcaactcacagagttgaaccctcctatggatagagcagttttgaaactctctttttgtggaatctgcaagtggatatgtggacctctccgaagatgtctttggaaacgggaatatcttcacataaaaactaaacagaagcattctcagaaacttcttggtgatgtttgcattcaaatcccagagttgaaccttcctttgatagttcaggtttgaaacactctttttgtaggatctgcaagtggatatttggaccactctgtggccttcgttcgaaacgggtacatcttcgcataaaatctagacagaagcattctcagaaaatactttgtgatgattgagtttaactcacagagctgaacattcctttggatggagcaggtttgagacacaccttttgtagaatctacaagtggatatttggacctctctgaggatttcgttggaaacgggataactgcacctaactaaacggaagcattctcagaaactgctttgtgatgattgcattcacctcacagagttgaacattcctattgatagagcagtttggaaacactcttgttgtggaatgtgcaagtggagatttggagcgctttgaggcctatggtagtaaagggaatagcttcatagaaaaactagacagatgcattctcaggaactttttggtgatgtttgtattcaactcccagagttgaactttcctttggaaagagcagctatgaaacactctttttctagaatctgcaagtggacgtttggagggctttgtggtttgtggtggaaaaggaaatatcttcacctaaatactagatagaagcattctcagaagcttctctgtgatgactgcattcaactcacggagttgaacactccttttgagagcgcagttttgaaactctctttctgtggcatctgcaaggggacatgtagacctctttgaagatttcgttggaaacggaatcatcttcacataaaaactatacagaagcagtctcagaatcttctttgtgatgtttgcattcaaatcccagagttgaactttcctttcaaagttcacgtttgaaacactctttttgcaggatctacaagtggatatttggaccactctgtgtccttcgttcgaaacgggtatatcttcacatgacatctagacagaagctttctcagaaaattctttgggatgattgagttgaactcacagagctgaacattccttgcgatggagcagtttagaaacacactttctgcagaatctgcaattgcatatttggacctctctgaggaattcgttggaaacgggataatttcagctgactaaacagaagcattctcagaaccttcttcgtgatgtctgcattcaactcacagtgtggaacctttctttgatagttcaggtttgaaacactctttttgtagaaactgcaaggggataattgcactctttgaggagtaccgtagtaaaggaaataacttcctataaaaagaagacagaagcattctcagaaccctcttcgtgatgtttgcattcaactcacagtgctgaacctttctttgatagttcagctttgaaacactctttttgtagaaactgcaagtggatatttggtcctctctgagcatttcgttggaaacgggataaactgcacagaactaaacagaagcattctcagaaccttcttcgtgatgtttgcattcaactcacagtgttgaacctttctttgatagttcaggtttgaaacggtctttctgtagaaactgcaagtagatatttggacctctctgaggatttcgttggaaacgggataacccgcacagaactaaaacagaagcattcacagaaaactcttggtgacgactgagtttaactcacagagctgaacattcctttggatggagcagtttcgaaacacactatttgtagaatgtgcaagtggatatttgggcctctctgaggatttcgttggaaacgggataaaccgcacagaactaaacagaagcattctcagaaactactttgtgatgattgcattcaagtcacagagttgaacattccctttgacagagcagtttggaaactctctttgtgtagaatctgcaagtggagatatggaccgctttgaggcctatggtagtaaaggaaatagcttcatataaaagctagacagtagcattctcagaaacttctttgtgatgcttgcattcaactcacagagttgaactttcctttcgagagagaagctttgaaacactctttttccagaatctgcaagtggacatttggagggctttgaggcctgtggtggaaaaggaattatcttcccgtaaaagctagatggaagcattgtgagaaactactttgtgatgattgcattcaactcacagagttgaaggttccttttcaaacagcagtttccaatcactctttctgtggaatctgcaagtggatatttggacctattttgaagatttcgttggaaacgggagaatcttcacagaaaagctaaacagaagcattctcagaaacttctctgtgatgtttgtgttcaactcccagagtttcacattgcttttcatagagtagttctgaaacatgcttttcgtagtgtctgcaagtggacatttggagcgctttcaggcctgtggtggaaaacgaattatggtcacataaaaactggagagaagccttctcagaaacttctctgtgatgattgcattcaactcacagagttgaaccctcctatggatagagcagtgttgaaactctctttttgtggaatctgcaagtggatatgtggacctctccgaagatgtctttggaaacgggaatatcttcacctaaaaactaaacagatgcattctcaggaacttcttggtgatgtttgcattcaaatcccagaggtgaaccttcctttgatagttcaggtttgaaacactctttttgtaggatctgcaagtggctatttggaccactctgtgggcttcgttcgaaacgggtatatcttcgcataaaatctagacagaagcattctcagaaaatactttgtgatgattgagtttaaatcacagagctgaccattcctttggatggagcaggtttgagacacactttttgtagaatctacaagtggatatttggacctctctgaggatttcgttggaaacgggataactgcacctaactaaacggaagcattctcagaaactgctttgtgatgattgcattcacctcacagagttgaacattcctattgatagagcagtttggaaacactcttgttgtggaatgtgcaagtggagatttggagcgctttgaggcctatggtagtaaagggaatagcttcatagaaaaactagacagatgcattctcaggaactttttggtgatgtttgtattcaactcccagagttgaactttcctttggaaagagcagctatgaaacactctttttctagaatctgcaagcggacgtttggagggctttgtggtttgtggtggaaaaggaaatatcttcacctaaatactagatagaagcattctcagaagcttctctgtgatgactgcattcaactcacggagttgaacactccttttgagagcgcagttttgaaactctctttctgtggcatctgcaaggggacatgtagacctctttgaagatttcgttggaaacggaatcatcttcacataaaaactatacagaagcagtctcagaatcttctttgtgatgtttgcattcaaatcccagagttgaactttcctttcaaagttcacgtttgaaacactctttttgcaggatctacaagtggatatttggaccactctgtgtccttcgttcgaaacgggtatatcttcacacgacatctagacagaagctttctcagaaaattctttgggatgattgagtggaactcacagagctgaacattccttgcgatgtagcagtttagaaacacactttctgcagaatctgcaagtgcatatttggacctctctgaggaattcgttggaaacgggataatttcagctgactaaacagaagcattctcagaaccttcttcgtgatgtctgcattcaactcacagtgtggaacctttctttgatagttcaggtttgaaacactctttttgtagaaactgcaaggggataattgcacttctttgaggcctaccgtagtaaaggaaataacttcctatagaaagaagacagaagcattctcagaaccctcttcgtgatgtttgcattcaactcacagtgctgaacctttctttgatagttcagctttgaaacactcttcttgtagaaactgcaagtggatatttggtcctctctgaggatttcgttggaaacgggataaaccgcacagaactaaacagaagaattctcagagccctcttcgtgatgtttgcattcaactcacagtgctgaacctttctttgatagtgcagctttgaaacactctttttgtagaaactgcaagtggatgtttggtcctctctgaggatttcgttggaaacgggataaaccgcacagaactaaaacagagagcattgtcagaaacttctttgtgatgattgcattcaactcacagagttgaaggttccttttcaaacagcagtttccaatcactctttctgtggaatctgcaagtggatatttgggcctctctgaggatttcgttggaaacgggataaaacgcacagaactaaaacagagcattctcagaaacttctctgtgatgtttgtgttcaactcccagagtttcacattgcttctcatagagtagttctgaaacatgcttttcgtagtgtctgcaagtggacatttggagcgctttcaggcctgtggtggaaaacgagttatggtcacataaaaactggagagaagccttctcagaaacttctctgtgatgattgcattcaactcacagagttgaaccctcctatggatagagcagtgttgaaactctctttttgtggaatctgcaagtggatatgtggacctctccgaagatgtctttggaaacgggaatatcttcacataaaaactaaacagaagcattctcagaaacttcttggtgatgtttgcattcaaatcccagagttgaaccttcctttgatagttcaggtttgaaacactctttttgtaggatctgcaagtggatatttggaccactctgtggccttcgttcgaaacgggtacatcttcgcataaaatctagacagaagcattctcagaaaatactttgtgatgattgagttgaactcacagagctgaacattcctttggatggagcaggtttgagacacactttttgtagaatctacaagtggatatttggacctctctgaggatttcgttggaaacgggataactgcacctaactaaacggaagcattctcagaaactgctttgtgatgattgcattcacctcacagagttgaacattcctattgatagagcagtttggaaacactcttgttgtggaatgtgcaagtggagatttggagcgctttgaggcctatggtagtaaagggaatagcttcatagaaaaactagacagaatgcattctcaggaactttttggtgatgtttgtattcaactcccagagttgaactttcctttggaaagagcagctatgaaacactctttttctagaatctgcaagtggacgtttggagggctttgtggtttgtggtggaaaaggaaatatcttcacctaaatactagatagaagcattctcagaagcttctctgtgatgactgcattcaactcacggagttgaacactccttttgagagcgcagttttgaaactctctttctgtggcatctgcaaggggacatgtagacctactttgaagatttcgttggaaacggaatcatcttcacataaaaactatacagaagcagtctcagaatcttctttgtgatgtttgcattcaaatcccagagttgaactttcctttcaaagttcacgtttgaaacactctttttgcaggatctacaagtggatatttggaccactctgtgtccttcgttcgaaacgggtatatcttcacacgacatctagacagaagctttctcagaaaattctttgggatgattgagtggaactcacagagctgaacattccttgcgatgtagcagtttagaaacacactttctgcagaatctgcaagtgcatatttggacctctctgaggaattcgttggaaacgggataatttcagctgactaaacagaagcattctcagaacttcttcgtgatgtctgcattcaactcacagtgtggaacctttctttgatagttcaggtttgaaacactctttttgtagaaactgcaaggggataattgcacttctttgaggcctaccgtagtaaaggaaataacttcctatagaaagaagacagaagaattctcagagccctcttcgtgatgtttgcattcaactcacagtgctgaacctttctttgatagtgcagctttgaaacactctttttgtagaaactgcaagtggatgtttggtcctctgctgaggatttcgttggaaacgggataaaccgcacagaactaaaacagaagcattgtcagaaacttctttgtgatgattgcattcaactcacagagttgaaggttccttttcaaacagcagtttccaatcactctttctgtggaatctgcaagtggatatttgggcctctctgaggatttcgttggaaacgggataaaacgcacagaactaaaacagaagcattctcagaaacttctctgtgatgtttgtgttcaactcccagagtttcacgttgcttttcatagagtagttctgaaacatgcttttcgtagtgtctgcaagtggacatttggagcgctttcaggcctgtggtggaaaacgaattatggtcacataaaaactggagagaagccttctcagaaacttctctgtgatgattgcattcaactcacagagttgaaccctcctatggatagagcagtgttgaaactctctttttgtggaatctgcaagtggatatgtggacctctccgaagatgtctttggaaacgggaatatcttcacataaaaactaaacagaagcattctcagaaacttcttggtgatgtttgcattcaaatcccagagttgaaccttcctttgatagttcaggtttgaaacactctttttgtaggatctgcaagtggctatttggaccaatctgtggccttcgttcgaaacgggtatatcttcgcataaaatctagacagaagcattctcagaaaatactttgtgatgattgagtttaaatcacagagctgaccattcctttggatggagcaggtttgagacacactttttgtagaatctacaagtggatatttggacctctctgaggatttcgttggaaacaggataactgcacctaactaaacggaagcattctcagaaactgctttgtgatgattgcattcacctcacagagttgaacattcgtattgatagagcagtttggaaacactcttcttgtggaatgtgcaagtggagatttggagcgctttggggcctatggtagtaaagggaatagcttcatagaaaaactagacagatgcattctcaggaactttttggtgatgtttgtattcaactcccagagttgaactttcctttggaaagagcagctatgaaacactctttttctagaatctgcaagtggacgtttggagggctttgtggtttgtggtggaaaaggaaatatcttcacctaaatactagatagaagcattctcagaagcttctctgtgatgactgcattcaactcacggagttgaacactccttttgagagcgcagttttgaaactctctttctgtggcatctgcaaggggacatgtagacctctttgaagatttcgttggaaacggaatcatcttcacataaaaactatacagaagcagtctcagaatcttctttgtgatgtttgcattcaaatcccagagttgaactttcctttcaaagttcacgtttgaaacactctttttgcaggatctacaagtggatatttggaccactctgtgtccttcgttcgaaacgggtatatcttcacacgacatctagacagaagctttctcagaaaattctttgggatgattgagtggaactcacagagctgaacattccttgcgatgtagcagtttagaaacacactttctgcagaatctgcaagtgcatatttggacctctctgaggaattcgttggaaacgggataatttcagctgactaaacagaagcattctcagaaccttcttcgtgatgtctgcattcaactcacagtgtggaacctttctttgatagttcaggtttgaaacactctttttgtagaaactgcaaggggataattgcacttctttgaggcctaccgtagtaaaggaaataacttcctatagaaagaagacagaagcattctcagaaccctcttcgtgatgtttgcattcaactcacagtgctgaacctttctttgatagttcagctttgaaacactcttcttgtagaaactgcaagtggatatttggtcctctctgaggatttcgttggaaacgggataaaccgcacagaactaaacagaagaattctcagagccctcttcgtgatgtttgcattcaactcacagtgctgaacctttctttgatagtgcagctttgaaacactctttttgtagaaactgcaagtggatgtttggtcctctctgaggatttcgttggaaacgggataaaccgcacagaactaaaacagaagcattgtcagaaacttctttgtgatgattgcattcaactcacagagttgaaggttccttttcaaacagcagtttccaatcactctttctgtggaatctgcaagtggatatttgggcctctctgaggatttcgttggaaacgggataaaacgcacagaactaaaacagaagcattctcagaaacttctctgtgatgtttgtgttcaactcccagagtttcacgttgcttttcatagagtagttctgaaacatgcttttcgtagtgtctgcaagtggacatttggagcgctttcaggcctgtggtggaaaacgaattatggtcacataaaaactggagagaagccttctcagaaacttctctgtgatgattgcattcaactcacagagttgaaccctcctatggatagagcagtgttgaaactctctttttgtggaatctgcaagtggatatgtggacctctccgaagatgtctttggaaacgggaatatcttcacataaaaactaaacagaagcattctcagaaacttcttggtgatgtttgcattcaaatcccagagttgaaccttcctttgatagttcaggtttgaaacactctttctgtaggatctgcaagtggctatttggaccactctgtggccttcgttcgaaacgggtatatcttcgcataaaatctagacagaagcattctcagaaaatactttgtgatgattgagtttaaatcacagagctgaccattcctttggatggagcaggtttgagacacactttttgtagaatctacaagtggatatttggacctctctgaggatttcgttggaaacgggataactgcacctaactaaacggaagcattctcagaaactgctttgtgatgattgcattcacctcacagagttgaacattcctattgatagagcagtttggaaacactcttgttgtggaatgtgcaagtggagatttggagcgctttgaggcctatggtagtaaagggaatagcttcatagaaaaactagacagatgcattctcaggaactttttggtgatgtttgtattcaactcccagagttgaactttcctttggaaagagcagctatgaaacactctttttctagaatctgcaagtggacgtttggagggctttgtggtttgtggtggaaaaggaaatatcttcacctaaatactagatagaagcattctcagaagcttctctgtgatgactgcattcaactcacggagttgaacactccttttgagagcgcagttttgaaactctctttctgtggcatctgcaaggggacatgtagacctctttgaagatttcgttggaaacggaatcatcttcacataaaaactatacagaagcagtctcagaatcttctttgtggtgtttgcattcaaatcccagagttgaactttcctttcaaagttcacgtttgaaacactctttttgcaggatctacaagtggatatttggaccactctgtgtccttcgttcgaaacgggtatatcttcacatgacatctagacagaagcattgtcagaaacttctttgtgatgattgcattcaactcacagagttgaaggttccttttcaaacagcagtttccaaacaccctttctgtggaatctgcaagtgcatatttggacctctctgaggaattcgttggaaacgggataatttcagctgactaaacagaagcattctcagaaccttctctgtgatgtttgtgttcaactcccagagtttcacattgcttttcatagagtagttctgaaacatgcttttcgtagtgtctgcaagtggacatttggagcgctttcaggcctgtggtggaaaacgaattatggtcacataaaaactggagagaagccttctcagaaacttctctgtgatgattgcattcaactcacagagttgaacactcctatggatagagcagtgttgaaactctctttttgtgaaatctgcaagtggatatgtggacctctccgaagatgtctttggaaacgggaatatcttcacataaaagctaaacagaagcattctcagaaacttcttggtgatgtttgcattcaaatcccagagttgaacattcctttgacagttcaggtttgaaacactctttttgtaggttctgcaagtggatatttggaccactctgtggccttcgttcgaaacgggtacatcttcgcataaaatctagacagaagcattctcagaaaatactttgtgatgattgagtttaactcacagagctgaacattcctttggatggagcaggtttgagacacactttttatagaatctacaagtggatatttggacctctctgaggatttcgttggaaacgggataactgcacctaactaaacggaagcattctcagcaaactgctttgtgatgattgcattcacctcacagagttgaacattcctattgatagaggagtttggaaacactcctgttgtggaatgtgcaagtggagatttggagcgctttgaggcctatggtagtaaagggaataacttcatagaaaaactagacagatgcattctcaggtaactttttggtgatgtttgtattcaactcccagcagttgaactttcctttggaaagagcagctatgaaacactctttttctagaatctgcaagtggacgtttggagggctttgtggtttgtggtggaaaaggaaatatcttcacctaaatactagacagaagcattctcagaagcttctctgtgatgactgcattcaactcacggagttgaacactccttttgagagcgcagttttgaaactctctttctgtggcatctgcaaggggacatgtagacctctttgaagatttcgttggaaacggaatcatcttcacataaaaactatacagaagcagtctcagaatcttctttgtgatgtttgcattcaaatcccagagttgaactttcctttcaaagttcacgtttgaaacactctttttgcaggatctacaagtggatatttggaccactctgtgtccttcgttcgaaacgggtatatcttcacatgacatctagacagaagctttctcagaaaattctttgggttgattgagtggaactcacagagctgaacattccttgcgatgtagcagtttagaaacacactttctgcagaatctgcaagtgcatatttggacctctctgaggaattcgttggaaacgggataatttcagctgactaaacagaagcattctcagaaccttcttcgtgatgtctgcattcaactcacagtgtggaacctttctttgatagttcaggtttgaaacactctttttgtagaaactgcaaggggataattgcacttctttgaggcctaccgtagtaaaggaaataacttcctatagaaagaagacagaagcattctcagaaccctcttcgtgatgtttgcattcaactcacagtgctgaacctttctttgatagttcagctttgaaacactcttcttgtagaaactgcaagtggatatttggtcctctctgaggatttcgttggaaacgggataaaccgcacagaactaaacagaagaattctcagagccctcttcgtgatgtttgcattcaactcacagtgctgaacctttctttgatagtgcagctttgaaacactctttttgtagaaactgcaagtggatgtttggtcctctctgaggatttcgttggaaacgggataaaccgcacagaactaaaacagaagcattgtcagaaacttctttgtgatgattgcattcaactcacagagttgaaggttccttttcaaacagcagtttccaatcactctttctgtggaatctgcaagtggatatttgggcctctctgaggatttcgttggaaacgggataaaacgcacagaactaaaacagaagcattctcagaaacttctctgtgatgtttgtgttcaactcccagagtttcacgttgcttttcatagagtagttctgaaacatgcttttcgtagtgtctgcaagtggacatttggagcgctttcaggcctgtggtggaaaacgaattatggtcacataaaaactggagagaagccttctcagaaacttctctgtgatgattgcattcaactcacagagttgaaccctcctatggatagagcagtgttgaaactctctttttgtggaatctgcaagtggatatgtggacctctccgaagatgtctttggaaacgggaatatcttcacataaaaactaaacagaagcattctcagaaacttcttggtgatgtttgcattcaaatcccagagttgaaccttcctttgatagttcaggtttgaaacactctttctgtaggatctgcaagtggctatttggaccactctgtggccttcgttcgaaacgggtatatcttcgcataaaatctagacagaagcattctcagaaaatactttgtgatgattgagtttaaatcacagagctgaccattcctttggatggagcaggtttgagacacactttttgtagaatctacaagtggatatttggacctctctgaggatttcgttggaaacgggataactgcacctaactaaacggaagcattctcagaaactgctttgtgatgattgcattcacctcacagagttgaacattcctattgatagagcagtttggaaacactcttgttgtggaatgtgcaagtggagatttggagcgctttgaggcctatggtagtaaagggaatagcttcatagaaaaactagacagatgcattctcaggaactttttggtgatgtttgtattcaactcccagagttgaactttcctttggaaagagcagctatgaaacactctttttctagaatctgcaagtggacgtttggagggctttgtggtttgtggtggaaaaggaaatatcttcacctaaatactagatagaagcattctcagaagcttctctgtgatgactgcattcaactcacggagttgaacactccttttgagagcgcagttttgaaactctctttctgtggcatctgcaaggggacatgtagacctctttgaagatttcgttggaaacggaatcatcttcacataaaaactatacagaagcagtctcagaatcttctttgtgatgtttgcattcaaatcccagagttgaactttcctttcaaagttcacgtttgaaacactctttttgcaggatctacaagtggatatttggaccactctgtgtccttcgttcgaaacgggtatatcttcacacgacatctagacagaagctttctcagcaaaattctttgggatgattgagtggaactcacagagctgaacattccttgcgatgtagcagtttagaaacacactttctgcagaatgtgcaagtgcatatttggacctctctgaggaattcgttggaaacgggataatttcagctgactaaacagaagcattctcagaaccttcttcgtgatgtctgcattcaactcacagtgtggaacctttcttttatagttcaggtttgaaacactctttttgtagaaactgcaaggggataattgcactctttgaggagtaccgtagtaaaggaaataacttcctataaaaagaagacagaagcattctcagaaccctcttcgtgatgtttgcattcaactcacagtgctgaacctttctttgatagttcagctttgaaacactctttttgtagaaactgcaagtggatatttggtcctctctgagcatttcgttggaaacgggataaactgcacagaactaaacagaagcattctcagaaccttcttcgtgatgtttgcattcaactcacagtgttgaacctttctttgatagttcaggtttgaaacggtctttctgtagaaactgcaagtagatatttggacctctctgaggatttcgttggaaacgggataacccgcacagaactaaaacagaagcattcacagaaaactcttggtgacgactgagtttaactcacagagctgaacattcctttggatggagcagtttcgaaacacactatttgtagaatgtgcaagtggatatttgggcctctctgaggatttcgttggaaacgggataaaccgcacagaactaaacagaagcattctcagaaactactttgtgatgattgcattcaagtcacagagttgaacattccctttgacagagcagtttggaaactctctttgtgtagaatctgcaattgagatatggaccgctttgtggcctatggtagtaaaggaaatagcttcatataaaagctagacagtagcattctcagaaacttctttgtgatgcttgcattcaactcacagagttgaactttcctttcgagagagaagctttgaaacactctttttccagaaagtgcaagtggacatttggtgggctttgaggcatgtggtggaaaaggaattatcttccggtaaaagctagatagaagcattgtcagaaacttctttgtgatgattgcattcaactcacagagttgaaggttccttttcaaacagcaatttccaatcactctttctgtggaatctgcaagtggatatttcgacctctttgaagatttcgttggaaacgggagaatcttcacagaaaagctaaacagaagcattctcagaaacttctctgtgatgtttgtgttcaactcccagagtttcacattgcttctcatagagtagttctgaaacatgcttttcgtagtgtctgcaagtggacatttggagcgctttcaggcctgtggtggaaaacgaattatggtcacataaaaactggagagaagccttctcagaaacttctctgtgatgattgcattcaactcacagagttgaaccctcctatggatagagcagtgttgaaactctctttttgtggaatctgcaagcggatatgtggacctctccgaagatgtctttggaaacgggaatatcttcacataaaaactaaacagaagcattctcagaaacttcttggtgatgtttgcattcaaatcccagagttgaaccttcctttgagagttcaggtttgaaacactctttttgtaggatctgcaagtggatatttggaccactctgtggccttcgttcgaaacgggtacatcttcgcataaaatctagacagaagcattctcagaaaatactttgtgatgattgagtttaactcacagagctgaacattcctttggatggagcaggtttgagacacactttttgtagaatctacaagtggatatttggacctctctgaggatttcgttggaaacgggataactgcacctaactaaacggaagcattctcagaaactgctttgtgatgattgcattcacctcacagagttgaacattcctattgatagagcagtttggaaacactcttcttgtggaatgtgcaagtggagatttggagcgctttgaggcctatggtagtaaagggaatagcttcatagaaaaactagacagatgcattctcaggaactttttggtgatgtttgtattcaactcccagagttgaactttcctttggaaagagcagctatgaaacactctttttctagaatctgcaagtggacgtttggagggctttgtggtttgtggtggaaaaggaaatatcttcacctaaatactagatagaagcattctcagaagcttctctgtgatgactgcattcaactcacggagttgaacactccttttgagagcgcagttttgaaactctctttctgtggcatctgcaaggggacatgtagacctctttgaagatttcgttggaaacggaatcatcttcacatcaaaactatacagaagcagtctcagaatcttctttgtgatgtttgcattcaaatccccgagttgaactttcctttcaaagttcacgtttgaaacactctttttgcaggatctacaagtggatatttggaccactctgtgtccttcgttcgaaacgggtatatcttcacatgacatctagacagaagctttctcagaaaattctttgggatgattgagttgaactcacagagctgagcattccttgcgatgtagcagtttagaaacacactttctgcagaatctgcaagtgcatatttggacctctgtgaggaattcgttggaaacgggataatttcagctgactaaacagaagcattctcagaaccttcttcgtgatgtctgcattcaactcacagtgtggaacctttctttgatagttcaggtttgaaacactctttttgtagaaactgcaaggggataattgcactctttgaggagtaccgtagtaaaggaaataacttcctataaaaagaagacagaagcattctcagaaccctcttcgtgatgtttgcattcaactcacagtgctgaacctttctttgatagttcagctttgaaacacactttttgtagaaactgcaagtggatatttggtcctctctgaggatttcgttggaaacgggataaactgcacagaactaaacagaagcattctcagaacttcttcgtgatgtttgcattcaactcacagtgttgaacctttctttgatagttcaggtttgaaacggtctttctgtagaaactgcaagtagatatttggacctctctgaggatttcgttggaaacgggataaaccgcacagaactaaaacagaagcattcacagaaaactcttggtgacgactgagtttaactcacagagctgaacattcctttggatggagcagtttcgaaacacactatttgtagaatctgcaagtggatatttgggcctctctgaggatttcgatggaaacgggataaaccgcacagaactaaacagaagcattctcagaaactactttgtgatgattgcattcaagtcacagagctgaacattccctttgacagagcagtttggaaactctctttgtgtagaatctgcaagtggagatatggaatgctttgaggactatggtagtaaaggaaatagcttcatataaaagctagacagtagcattctcagaaacttctttgtgatgcttgcattcaactcacagagttgaactttcctttcgagagagaagctttgaaacactctttttccagaatctgcaagtggacatttggagggctttgaggcctgtggtggaaaaggaattatcttcccgtaaaagctagatagaagctttgtcagaaacttctttgtgatgattgcattcaagtcacagagttgaaggttccttttcaaagagcagtttccaatcactctttctgtggaatctgcaagtggatatttggacctctttgaagatttcgttggaaacgggagaatattcacagaaaagctaaacagaagcattctcagaaacttctctgtgatgtttgtgttcaactcccagagtttcacattgcttttcatagagtagttctgaaacatgcttttcgtagtgtctgcaagtggacatttggagcgctttcaggcctgtggtggaaaacgaattatggtcacataaaaactggagagaagccttctcagaaacttctctgtgatgattgcattcaactcacagagttgaaccctcctatggatagagcagtgttgaaactctctttttgtggaatctgcaagtggatatgtggacctctccgaagatgtctttggaaacgggaatatcttcacataaaaactaaacagaagcattctcagaaacttcttggtgatgtttgcattcaaatcccagagttgaaccttcctttgatagttcaggtttgaaacactctttttgtaggatctgcaagtggatatttggaccactctgtggccttcgttcgaaacgggtacatcttcgcataaaatctagacagaagcattctcagaaaatactttgtgatgattgagtttaactcacagagctgaacattcctttggatggtgcaggtttgagacacactttttgtagaatctacaagtggatatttggacctctctgaggatttcgttggaaacgggataactgcacctaactaaacggaagcattctcagaaactgctttgtgatgattgcattcacctcacagagttgaacattcctattgatagagcagtttggaaacactcttgttgtggaatgtgcaagtggagatttggagcgctttgaggcctatggtagtaaagggaatagcttcatagaaaaactagacagatgcattctcaggaactttttggtgatgtttgtattcaactcccagagttgaactttcctttggaaagagcagctatgaaacactctttttctagaatctgcaagtggacgtttggagggctttgtggtttgtggtggaaaaggaaatatcttcacctaaatactagatagaagcattctcagaagcttctctgtgatgactgcattcaactcacggagttgaacactccttttgagagcgcagttttgaaactctctttctgtggcatctgcaaggggacatgtagacctctttgaagatttcgttggaaacggaatcatcttcacataaaaactatacagaagcagtctcagaatcttctttgtgatgtttgcattcaaatcccagcagttgaactttcctttcaaagttcacgtttgaaacactctttttgcaggatctacaagtggatatttggaccactctgtgtccttcgttcgaaacgggtatatcttcacacgacatctagacagaagctttctcagaaaattctttgggatgattgagtggaactcacagagctgaacattccttgcgatgtagcagtttagaaacacactttctgcagaatctgcaagtgcatatttggacctctctgaggaattcgttggaaacgggataatttcagctgactaaacagaagcattctcagaaccttcttcgtgatgtctgcattcaactcacagtgtggaacctttctttgatagttcaggtttgaaacactctttttgtagaaactgcaaggggataattgcacttctttgaggcctacccgtagtaaaggaaataacttcctatagaaagaagacagaagcattctcagaaccttcttcgtgatgtttgcattcaactcacactgctgaacctttctttgatagttcagctttgaaacactctttttgtagaaactgcaagtggatatttggtcctctctgaggatttcgttggaaacgggataaactacgcagaactaaacagaagaattctcagagccctcttcgtgatgtttgcattcaactcacagtgctgaacctttctttgatagtgcagctttgaaacactctttttgtagaaactgcaagtggatgtttggtcctctctgaggatttcgttggaaacgggataaaccgcacagaactaaaacagaagcattgtcagaaacttctttgtgatgattgcattcaactcacagagttgaaggttccttttcaaacagcagtttccaatcactctttctgtggaatctgcaagtggatatttgggcctctctgaggatttcgttggaaacgggataaaacgcacagaactaaaacagaagcattctcagaaacttctctgtgatgtttgtgttcaactcccagagtttcacgttgcttttcatagagtagttctgaaacatgcttttcgtagtgtctgcaagtggacatttggagcgctttcaggcctgtggtggaaaacgaattatggtcacataaaaactggagagaagccttctcagaaacttctctgtgatgattgcattcaactcacagagttgaaccctcctatggatagagcagtgttgaaactctctttttgtggaatctgcaagtggatatgtggacctctccgaagatgtctttggaaacgggaatatcttcacataaaaactaaacagaagcattctcagaaacttcttggtgatgtttgcattcaaatcccagagttgaaccttcctttgatagttcaggtttgaaacactctttctgtaggatctgcaagtggctatttggaccactctgtggccttcgttcgaaacgggtatatcttcgcataaaatctagacagaagcattctcagaaaatactttgtgatgattgagtttaaatcacagagctgaccattcctttggatggagcaggtttgagacacactttttgtagaatctacaagtggatatttggacctctctgaggatttcgttggaaacgggataactgcacctaactaaacggaaagcattctcagaaactgctttgtgatgattgcattcacctcacagagttgaacattcctattgatagagcagtttggaaacactcttgttgtggaatgtgcaagtggagatttggagcgctttgaggcctatggtagtaaagggaatagcttcatagaaaaactagacagtgcattctcaggaactttttggtgatgtttgcattcaactcccagagttgaactttcctttggaaagagcagctatgaaacattctttttctagaatctgcaagtggacgtttggagggctttgtggtttgtggtggaaaaggaaatatcttcacctaaatactagatagaagcatcctcagaagtcttctctgtgatgactgcattcaactcacggagttgaacactccttttgagagcgcagttttgaaactctctttctgtggcatctgcaaggggacatgtagacctctttgaagatttcgttggaaacggaatcatcttcacataaaaactatacagaagcagtctcagaatcttctttgtgatgtttgcattcaaatccccgagttgaactttcctttcaaagttcacgtttgaaacactctttttgcaggatctacaagtggatatttggaccactctgtgtccttcgttcgaaacgggtatatcttcacatgactctagacagaagctttctcagaaaattctttgggatgattgagttgaactcacagagctgaacattccttgcgatgtagcagtttagaaacacactttctgcagaatctgcaagggcatatttggacctctctgaggaattcgttggaaacgggataatttcagctgactaaacagaagcattctcagaaccttcttcgtgatgtctgcattcaactcacagtgtggaacctttctttgatagttcaggtttgaaacactctttttgtggaaactgcaaggggataattgcacttctttgaggcctaccgtagtaaaggaaataacttcctataaaaagaagacagaagaattctcagaaccgtcttcgtgatgtttgcattcaacacacagtgcttaacctttctttgatagttcagctttgaaacactgtttttgtagaaactgcaagtggatatttggtcctctctgaggatttcgttggaaacgtgttaaaccgcacagaactaaacagaagcattcacagaaaactcttggtgacgactgagtttaactcacagagctgaacattcctttggatggagcagtttcgaaacacactctttgtagaatctgcaagtggatatttgggcctctctgaggatttcgttggaaatgggataaaccgcacagaactaaaacagaagcattctgagaaactactttgtgatgattgcattcaagtcacagagctgaacattccctttgacagagcagtttggaaactctctttgtgtagaatctgcaagtggagatatggaatgctttgaggactatggtagtaaaggaaatagcttcatagacaagctagacagtagcattctcagaaacttctttgtgatgcttgcattcaactcacagagttgaactttcctttcgagagagaagctttgaaacactctttttccagaatctgcaagtggacatttggggggctttgaggcctgtggtggaaaaggaattatcttcccgtaaaagctggatagaagcattgtcagaaacttctttgtgatgattgcattcaactcacagagttgaaggttccttttcaaacagcagtttccaaacactctttctgtggaatctgcaagtggatgtttggacctctttgaagatttcgttggaaacgggagaatcttcacagaaaagctaaacagaagcattctcagaaacttctctgtgatgtttgtgttcaactcccagagtttcacattgcttttcatagagtagttctgaaacatgcttttcgtagtgtctgcaagtggacatttggagcgctttcaggcctgtggtggaaaacgaattatggtcacataaaaactggagagaagccttctcagaaacttctctgtgatgattgcattcaactcacagagttgaaccctcctatggatagagcagtgttgaaactctctttttgtggaatctgcaagtggatatgtggacctctccgaagatgtctttggaaacgggaatatcttcacataaaaactaaacagaagcattctcagaaacttcttggtgatgtttgctttcaaatcccagagttgaaccttcctttgatagtttaggtttgaaacactctttttgtaggatctgcaagtggatatttggaccactctgtggccttcgttcgaaacgggtacatcttcgcataaaatctagacagaagcattctcagaaaatactttgtgatgattgagttgaactcacagagctgaacattcctttggatggagcaggtttcagacacactttttgtagaatctacaagtggatatttggacctctctgaggatttcgttggaaacggggtaactgcacctaactaaacggaagcattctcagaaactgctttgtgatgattgcattcacctcacagagttgaacattcctattgatagagcagtttggaaacactcttgttgtggaatgtgcaagtggagatttggagcgctttgaggcctatggtagtaaagggaatagcttcatagaaaaactagacagatgcattctcaggaactttttggtgatgtttgtattcaactcccagagttgaactttcctttggaaagagcagctatgaaacactctttttctagaatctgcaagtggacgtttggagggctttgtggtttgtggtggaaaaggaaatatcttcacctaaatactagatagaagcattctcagaagcttctctgtgatgactgcattcaactcacggagttgaacactccttttgagagcgcagttttgaaactctctttctgtggcatctgcaaggggacatgtagacctctttgaagatttcgttggaaacggaatcatcttcacataaaaactatacagaagcagtctcagaatcttctttgtgatgtttgcattcaaatcccagagttgaactttcctttcaaagttcacgtttgaaacactctttttgcaggatctacaagtggatatttggaccactctgtgtccttcgttcgaaacgggtatatcttcacacgacatctagacagaagctttctcagaaaattctttgggatgattgagtggaactcacagagctgaacattccttgcgatgtagcagtttagaaacacactttctgcagaatctgcaagtgcatatttggacctctctgaggaattcgttggaaacgggataatttcagctgactaaacagaagcattctcagaaccttcttcgtgatgtctgcattcaactcacagtgtggaacctttctttgatagttcaggtttgaaacactctttttgtagaaactgcaaggggataattgcacttctttgaggcctaccgtagtaaaggaaataacttcctatagaaagaagacagaagcattctcagaaccctcttcgtgatgtttgcattcaactcacagtgctgaacctttctttgatagttcagctttgaaacactcttcttgtagaaactgcaagtggatatttggtcctctctgaggatttcgttggaaacgggataaaccgcacagaactaaacagaagaattctcagagccctcttcgtgatgtttgcattcaactcacagtgctgaacctttctttgatagtgcagctttgaaacactctttttgtagaaactgcaagtggatgtttggtcctctctgaggatttcgttggaaacgggataaaccgcacagaactaaaacagaagcattgtcagaaacttctttgtgatgattgcattcaactcacagagttgaaggttccttttcaaacagcagtttccaatcactctttctgtggaatctgcaagtggatatttgggcctctctgaggatttcgttggaaacgggataaaacgcacagaactaaaacagaagcattctccgaaactactctgtgatgtttgtgttcaactcccagagtttcacattgcttttcatagagtagttctgaaacatgcttttcgtagtgtctgcaagtggacatttggagcgctttcaggcctgtggtggaaaacgaattatggtcacataaaaactggagagaagccttctcagaaacttctctgtgatgattgcattcaactcacacagttgaaccctcctatggatagagcagtgttgaaactctctttttgtggaatctgcaagtggatatgtggacctctccgaagatgtctttggaaacgggaatatcttcacataaaaactaaacagaagcattctcagaaacttcttggtgatgtttgcattcaaatcccagagttgaaccttcctttgatagttcaggtttgaaacactctttttgtaggatctgcaagtggatatttggaccactctgtggccttcgttcgaaacgggtacatcttcgcataaaatctagacagaagcattctcagaaaatactttgtgatgattgagtttaactcacagagctgaacattcctttggatggagcaggtttgagacacactttttgtagaatctacaagtggatatttggacctctctgaggatttcgttggaaacgggataactgcacctaactaaacggaagcattctcagaaactgctttgtgatgattgcattcacctcacagagttgaacattcctattgatagagcagtttggaaacactcttgttgtggaatgtgcaagtggagatttggagcgctttgaggcctatggtagtaaagggaatagcttcatagaaaaacaagacagatgcattctcaggaactttttggtgatgtttgtattcaactcccagagttgaactttcctttggaaagagcagctatgaaacactctttttctagaatctgcaagtggacgtttggagggctttgtggtttgtggtggaaaaggaaatatcttcacctaaatactagatagaagcattctcagaagcttctctgtgatgactgcattcaactcacggagttgaacactccttttgagagcgcagttttgaaactctctttctgtggcatctgcaaggggacatgtagacctctttgaagatttcgttggaaacggaatcatcttcacataaaaactatacagaagcagtctcagaatcttctttgtgatgtttgcattcaaatcccagagttgaactttcctttcaaagttcacgtttgaaacactctttttgcaggatctacaagtggatatttggaccactctgtgtccttcgttcgaaacgggtatatcttcacacgacatctagacagaagctttctcagaaaattctttgggatgattgagtggaactcacagagctgaacattccttgcgatgtagcagtttagaaacacactttctgcagaatctgcaagtgcatatttggacctctctgaggaattcgttggaaacgggataatttcagctgactaaacagaagcattctcagaaccttcttcgtgatgtctgcattcaactcacagtgtggaacctttctttgatagttcaggtttgaaacactctttttgtagaaactgcaaggggataattgcacttctttgaggcctaccgtagtaaaggaaataacttcctatagaaagaagacagaagcattctcagaaccctcttcgtgatgtttgcattcaactcacagtgctgaacctttctttgatagttcagctttgaaacactcttcttgtagaaactgcaagtggatatttggtcctctctgaggatttcgttggaaacgggataaaccgcacagaactaaacagaagaattctcagagccctcttcgtgatgtttgcattcaactcacagtgctgaacctttctttgatagtgcagctttgaaacactctttttgtagaaactgcaagtggatgtttggtcctctctgaggatttcgttggaaacgggataaaccgcacagaactaaaacagaagcattgtcagaaacttctttgtgatgattgcattcaactcacagagttgaaggttccttttcaaacagcagtttccaatcactctttctgtggaatctgcaagtggatatttgggcctctctgaggatttcgttggaaacgggataaaacgcacagaactaaaacagaagcattctcagaaacttctctgtgatgtttgtgttcaactccccagagtttcacgttgcttttcatagagtagttctgaaacatgcttttcgtagtgtctgcaagtggacatttggagcgctttcaggcctgtggtggaaaacgaattatggtcacataaaaactggagagaagccttctcagaaacttctctgtgatgattgcattcaactcacagagttgaaccctcctatggatagagcagtgttgaaactctctttttgtggaatctgcaagtggatatgtggacctctccgaagatgtctttggaaacgggaatatcttcacataaaaactaaacagaagcattctcagaaacttcttggtgatgtttgcattcaaatcccagagttgaaccttcctttgatagttcaggtttgaaacactctttttgtaggatctgcaagtggatatttggaccactctgtggccttcgttcgaaacgggtatatcttcgcataaaatctagacagaagcattctcagaaaatactttgtgatgattgagtttaactcacagagctgaacattcctttggatggagcaggtttgagacacactttttgtagaatctacaagtggatatttggacctctctgaggatttcgttggaaacgcgataactgcacctaactaaacggaagcattctcagaaactgctttgtgatgattgcattcacctcacagagttgaacattcctattgatagagcagtttggaaacactcttgttgtggaatgtgcaagtggagatttggagcgctttgaggcctatggtagtaaagggaatagcttcatagaaaaactagacagatgcattctcaggaactttttggtgatgtttgtattcaactcccagagttgaactttcctttggaaagagcagctatgaaacactctttttctagaatctgcaagtggacgtttggagggctttgtggtttgtggtggaaaaggaaatatcttcacctaaatactagatagaagcattctcagaagcttctctgtgatgactgcattcaactcacggagttgaacactccttttgagagcgcagttttgaaactctctttctgtggcatctgcaaggggacatgtagacctctttgaagatttcgttggaaacggaatcatcttcacataaaaactatacagaagcagtctcagaatcttctttgtgatgtttgcattcaaatcccagagttgaactttcctttcaaagttcacgtttgaaacactctttttgcaggatctacaagtggatatttggaccactctgtgtccttcgttcgaaacgggtatatcttcacatggcatctagacagaagctttctcagaaaatcctttgggatgattgagtggaactcacagagctgaacattccttgcgatgtagcagtttagaaacacactttctgcagaatctgcaagtgcatatttggacctctccgaggaattcgttggaaacgggataatttcagctgactaaacagaagcattctcagaaccttcttcgtgatgtctgcattcaactcacagtgtggaacctttctttgatagttcaggtttgaaacactctttttgtagaaactgcaaggggataatggcacttctttgatgcctaccgtagtaaaggaaataacttcctatagaaagaagacagaagcattctcagaaccctcttcgtgatgtttgcattcaactcacagtgctgaacctttctttgatagttcagctttgaaacactcttcttgtagaaactgcaagtggatatttggtcctctctgaggatttcgttggaaacgggataaaccgcacagaactaaacagaagaattctcagagccctcttcgtgatgtttgcattcaactcacagtgctgaacctttctttgatagtgcagctttgaaacactctttttgtagaaactgcaagtggatgtttggtcctctctgaggatttcgttggaaacgggataaaccgcacagaactaaaacagagcattgtcagaaacttctttgtgatgattgcattcaactcacagagttgaaggttccttttcaaacagcagtttccaatcactctttctgtggaatctgcaagtggatatttgggcctctctgaggatttcgttggaaacgggataaaacgcacagaactaaaacagaagcattctcagaaacttctctgtgatgtttgtgttcaactcccagagtttcacattgcttttcatagagtagttctgaaacatgcttttcgtagtgtctgcaagtggacatttggagcgctttcaggcctgtggtggaaaacgaattatggtcacataaaaactggagagaagccttctcagaaacttctctgtgatgattgcattcaactcacagagttgaaccctcctatggatagagcagtgttgaaactctctttttgtggaatctgcaagtggatatgtggacctctccgaagatgtctttggaaacgggaatatcttcacctaaaaactaaacagaagcattctcagaaacttcttggtgatgtttgcattcaaatcccagagttgaaccttcctttgagagttcaggtttgaaacactctttttgtaggatctgcaagtggatatttggaccactctgtggccttcgttcgaaacgggtacatcttcgcataaaatctagacagaagcattctcagaaaatactttgtgatgattgagttaaaatcacagagctgaacattcctttggatggagcaggtttgagacacactttttgtagaatctacaagtggatatttggacctctctgaggatttcgttggaaacgggataactgcacctaactaaacggaagcattctcagaaactgctttgtgatgattgcattcacctcacagagttgaacattcctattgatagagcagtttggaaacactcttgttgtggaatgtgcaagtggagatttggagcgctttgaggcctatggtagtaaagggaatagcttcatagaaaaactagacagatgcattctcaggaactttttggtgatgtttgtattcaactcccagagttgaactttcctttggaaagagcagctatgaaacactctttttctagaatctgcaagtggacgtttggagggctttgtggtttgtggtggaaaaggaaatatcttcacctaaatactagatagaagcattctcagaagcttctctgtgatgactgcattcaactcacggagttgaacactccttttgagagcgcagttttgaaactctctttctgtggcatccgcaaggggacatgtggacctctttgaagatttcgttggaaacggaatcatcttcacataaaaactatacagaagcagtctcagaatcttctttgtgatgtttgcattcaaatcccagagttgaactttcctttcaaagttcacgtttgaaacactctttttgcaggatctacaagtggatatttggaccactctgtgtccttcgttcgaaacgggtatatcttcacatgacatctagacagaagctttctcagaaaatgctttgggttgattgagttgaactcacagagctgaacattccttgcgatgtagcagtttagaaacacactttctgcagaatctgcaagtgcatatttggacctctctgaggaattcgttggaaacgggataatttcagctgactaaacagaagcattctcagaaccttcttcgtgatgtctgcattcaactcacagtgtggaacctttctttgatagttcaggtttgaaacactctttttgtagaaactgcaaggggataattgcacttctttgaggcctaccgtagtaaaggaaataacttcctatagaaagaagacagaagcattctcagaaccctcttcgtgatgtttgcattcaactcacagtgctgaacctttctttgatagttcagctttgaaacactcttcttgtagaaactgcaagtggatatttggtcctctctgaggatttcgttggaaacgggataaaccgcacagaactaaacagaagaactctcagagccctcttcgtgatgtttgcattcaactcacagtgctgaacctttctttgatagtgcagctttgaaacactctttttgtagaaactgcaagtggatatttggtcctctctgaggatttcgttggaaacgggataaaccgcacagaactaaaacagatagcattcacagaaaactcttggtgacgactgagtttaactcacagagctgaacattcctttggatggagcagtttcgaaacacactatttgtagaatctgcaagtggatatttgggcctctctgaggatttcgttggaaacgggataaaacgcacagaactaaaacagagcattctcagaaactactttgtgatgattgcattcaagtcacagagctgaacattccctttgacagagcagtttggaaactctctttgtgtagaatctgcaagtggagatatggaccgctttgaggactatgttagtaaaggaaatagcttcatataaaagctagacagtagcattctcagaaacttctttgtgatgcttgcattcaactcacagagttgaactttcctttcgagagagaagctttgaaacactctttttccagaatgtgcaagtggacatttggggagctttgaggcctgtggtggaaaaggaattatcttcccgtaaaagctagatagaagcattgtcagaaacttctttgtgatgattgcattcaactcacagagttgaaggttccttttcaaacagcagtttccaatcactctttctgtggaatctgcaagtggatatttcgacctctttgaagatttcgttggaaacgggagaatcttcacagaaaagctaaacagaagcattctcagaaacttctctgtgatgtttgtgttcaactcccagagtttcacgttgcttttcatagagtagatctgaaacatgcttttcgtagtgtctgcaagtggacatttggagcgctttcaggcctgtggtggaaaacgaattatggtcacataaaaactggagagaagccttctcagaaacttctctgtgatgattgcattcaactcacagagttgaaccctcctatggatagagcagtgttgaaactctctttttgtggaatctgcaagtggatatgtggacctctccgaagatgtctttggaaacgggaatatcttcacataaaaactaaacagaagcattctcagaaacttcttggtgatgtttgcattcaaatcccagagttgaaccttcctttgatagttcaggtttgaaacactctttctgtaggatctgcaagtggctatttggaccactctgtggccttcgttcgaaacgggtatatcttcgcataaaatctagacagaagcattctcagaaaatactttgtgatgattgagtttaaatcacagagctgaccattcctttggatggagcaggtttgagacacactttttgtagaatctacaagtggatatttggacctctctgaggatttcgttggaaacgggataactgcacctaactaaacggaagcattctcagaaactgctttgtgatgattgcattcacctcacagagttgaacattcctattgatagagcagtttggaaacactcttgttgtggaatgtgcaagtggagatttggagcgctttgaggcctgtggtagtaaagggaatagcttcatagaaaaactagacagatgcattctcaggaaccttttggtgatgtttgtattcaactcccagagttgaactttcctttggaaagagcagctatgaaacactctttttctagaatctgcaagtggacgtttggagggctttgtggtttgtggtggaaaaggaaatatcttcacctaaatactagatagaagcattctcagaagcttctctgtgatgactgcattcaactcacggagttgaacactccttttgagagcgcagttttgaaactctctttctgtggcatctgcaaggggacatgtagacctctttgaagatttcgttggaaacggaatcatcttcacataaaaagtatacagaagcagtctcagaatcttctttgcgatgtttgcattcaaatcccagagttgaactttcctttcaaagttcacgtttgaaacactctttttgcaggatctacaagtggatatttggaccactctgtgtccttcgttcgaaacgggtatatcttcacacgacatactagacagaagctttctcagaaaattctttgggatgattgagtggaactcacagagctgaacattccttgcgatgtagcagtttagaaacacactttctgcagaatctgcaagtgcatatttggacctctctgaggaattcgttggaaacgggataatttcagctgactaaacagaagcattctcagaaccttcttcgtgatgtctgcattcaactcacagtgtggaacctttctttgatagttcaggtttgaaacactctttttgtagaaactgcaaggggataattgcacttctttgaggcctaccgtagtaaaggaaataacttcctatagaaagaagacagaagcattctcagaaccctcttcgtgatgtttgcattcaactcacagtgctgaacctttctttgatagttcagctttgaaacactcttcttgtagaaactgcaagtggatatttggtcctctctgaggatttcgttggaaacgggataaaccgcacagaactaaacagaagcattctcagagccctcttcgtgatgtttgcattcaactcacagtgctgaacctttctttgatagtgcagctttgaaacactctttttgtagaaactgcaagtggatgtttggtcctctctgaggatttcgttggaaacgggataaaccgcacagaactaaaacagaagcattgtcagaaacttctttgtgatgattgcattcaactcacagagttgaaggttccttttcaaacagcagtttccaatcactctttctgtggaatctgcaagtggatatttgggcctctctgaggatttcgttggaaacgggataaaacgcacagaactaaaacagaagcattctcagaaacttctctgtgatgtttgtgttcaactcccagagtttcacgttgcttttcatagagtagttctgaaacatgcttttcgtagtgtctgcaagtggacatttggagcgctttcaggcctgtggtggaaaacgaattatggtcacataaaaactggagagaagccttctcagaaacttctctgtgatgattgcattcaactcacagagttgaaccctcctatggatagagcagtgttgaaactctctttttgtggaatctgcaagtggatatgtggacctctccgaagatgtctttggaaacgggaatatcttcacataaaaactaaacagaagcattctcagaaacttcttggtgatgtttgcattcaaatcccagagttgaaccttcctttgatagttcaggtttgaaacactctttctgtaggatctgcaagtggctatttggaccactctgtggccttcgttcgaaacgggtatatcttcgcataaaatctagacagaagcattctcagaaaatactttgtgatgattgagtttaaatcacagagctgaccattcctttggatggagcaggtttgagacacactttttgtagaatctacaagtggatatttggacctctctgaggatttcgttggaaacgggataactgcacctaactaaacggaagcattctcagaaactgctttgtgatgattgcattcacctcacagagttgaacattcctattgatagagcagtttggaaacactcttgttgtggaatgtgcaagtggagatttggagcgctttgaggcctatggtagtaaagggaatagcttcatagaaaaactagacagatgcattctcaggaactttttggtgatgtttgtattcaactcccagagttgaactttcctttggaaagagcagctatgaaacactctttttctagaatctgcaagtggacgtttggagggctttgtggtttgtggtggaaaaggaaatatcttcacctaaatactagatagaagcatcctcagaagcttctctgtgatgactgcattcaactcatggagttgaacactccttttgagagcgcagttttgaaactctctttctgtggcatctgcaaggggacatgtagacctctttgaagatttcgttggaaacggaatcatcttcacataaaaactatacagaagcagtctcagaatcttctttgtgatgtttgcattcaaatcccagagttgaactttcctttcaaagttcacgtttgaaacactctttttgcaggatctacaagtggatatttggaccactctgtgtccttcgttcgaaacgggtatatcttcacatgacatccagacagaagctttctcagaaaattctttgggatgattgagttgaactcacagagctgagcattccttgcgatgtagcagtttagaaacacactttctgcagaatctgcaagtgcatatttggacctctgtgaggaattcgttggaaacgggataatttcagctgactaaacagaagcattctcagaaccttcttcgtgatgtctgcattcaactcacagtgtggaacctttctttgatagttcaggtttgaaacactctttttgtagaaactgcaaggggataattgcactctttgaggagtaccgtagtaaaggaaataacttcctataaaaagaagacagaagaattctcagagccctcttcgtgatgtttgcattcaactcacagtgctgaacctttctttgatagtgcagctttgaaacactctttttgtagaaactgcaagtggatgtttggtcctctctgaggatttcgttggaaaccgggataaaccgcacagaactaaaacagaagcattctcagaaccttcttcgtgatgtttgcattcaactcacagtgttgaacctttctttgatagttcaggtttgaaacggtctttctgtagaaactgcaagtagatatttggacctctctgaggatttcgttggaaacgggataacccgcacagaactaaaacagaagcattcacagaaaactcttggtgacgactgagtttaactcacagagctgaacattcctttggatggagcagtttcgaaacacactatttgtagaatgtgcaagtggatatttaggcctctctgaggatttcgttggaaacgggataaaccgcacagaactaaacagaagcattctcagaaactactttgtgatgattgcattcaagtcacagagttgaacattccctttgacagagcagtttggaaactctctttgtgtagaatctgcaagtggagatatggaccgctttgaggcctatggtagtaaaggaaatagcttcatataaaagctagacagtagcattctcagaaacttctttgtgatgcttgcattcaactcacagagttgaactttcctttcgagagagaagctttgaaacactctttttccagaatctgcaagtggacatttggagggctttgaggcctgtggtggaaaaggaattatcttcccgtaaaagctagatagaagcattgtcagaaacttctttgtgatgattgcattcaactcacagagttgaaggttccttttcaaagagcagtttccaatcactctttctgtggaatctgcaagtggatatttggacctattttgaagatttcgttggaaacgggagaatcttcacaggaaagctaaacagaagcattctcagaaacttctctgtgatgtttgtgttcaactcccagagtttcatattgcttttcatagagtagttctgaaacatgcttttcgtagtgtctacaagtggacatttggagcgctttcaggcctgtggtggaaaacgaattatggtcacataaaaactggagagaagccttctcagaaacttctctgtgatgattgcattcaactcacagagttgaaccctcctatggatagagcagtgttgaaactctctttttgtgaaatctgcaagtggatatgtggacctctccgaagatgtctttggaaacgggaatatcttcacataaaaactaaacagaagcattctcagaaacttcttggtgatgtttgcattcaaatcccagagttgaaccttcctttgatagttcaggtttgaaacactctttctgtaggatctgcaagtggctatttggaccactctgtggccttcgttcgaaatgggtatatcttcgcataaaatctagacagaagcattctcagaaaatactttgtgatgattgagtttaaatcacagagctgaccattcctttggatggagcaggtttgagacacactttttgtagaatctacaagtggatatttggacctctctgaggatttcgttggaaacgggataactgcacctaactaaacggaagcattctcagaaactgctttgtgatgattgcattcacctcacagagttgaacattcctattgatagagcagtttggaaacactcttgttgtggaatgtgcaagtggagatttggagcgctttgaggcctatggtagtaaagggaatagcttcatagaaaaactagacagatgcattctcaggaactttttggtgatgtttgtattcaactcccagagttgaactttcctttggaaagagcagctatgaaacactctttttctagaatctgcaagtggacgtttggagggctttgtggtttgtggtggaaaaggaaatatcttcacctaaatactagatagaagcattctcagaagcttctctgtgatgactgcattcaactcacggagttgaacactccttttgagagcgcagttttgaaactctctttctgtggcatctgcaaggggacatgtagacctctttgaagatttcgttggaaacggaatcatcttcacataaaaactatacagaagcagtctcagaatcttctttgtgatgtttgcattcaaatccccgagttgaactttcctttcaaagttcacgtttgaaacactctttttgcaggatctacaagtggatatttggaccgctctgtgtccttcgttcgaaacgggtatatcttcacatgacatctagacagaagctttctcagaaaattctttgggatgattgagtagaactcacagagctgagcattccttgcgatgtagcagtttagaaacacactttctgcagaatctgcaagtgcatatttggacctctgtgaggaattcgttggaaacgggataatttcagctgactaaacagaagcattctcagaaccctcttcgtgatgtttgcattcaactcacagtgctgaacctttctttgatagttcagctttgaaacactctttctgtagaaactgcaaggggataattgcactctttgaggagtaccgtagtaaaggaaataacttcctataaaaagaagacagaagcattctcagaaccttcttcgtgatgtttgcattcaactcacagtgttgaacctttctttgatagttcaggtttgaaacggtctttctgtagaaactgcaagtagatatttggacctctctgaggatttcgttggaaacgggataacccgcacagaactaaaacagaagcattcacagaaaactcttggtgacgactgagtttaactcacagagctgaacattcctttggatggagcagtttcgaaacacactatttgtagaatgtgcaagtggatatttaggcctctctgaggatttcgttggaaacgggataaaccgcacagaactaaacagaagcattctcagaaactactttgtgatgattgcattcaagtcacagagttgaacattccctttgacagagcagtttggaaactctctttgtgtagaatctgcaagtggagatatggaccgctttgaggcctatggtagtaaaggaaatagcttcatataaaagctagacagtaagcattctcagaaacttctttgtgatgcttgcattcaactcacagagttgaactttcctttcgagagagaagctttgaaacactctttttccagaatctgcaagtggacatttggagggctttgaggcctgtggtggaaaaggaattatcttcccgtaaaagctagatagaagcattgtcagaaacttctttgtgatgattgcattcaactcacagagttgaaggttccttttcaaacagcagtttccaatcactctttctgtggaatctgcaagtggatatttgggcctctctgaggatttcgttggaaacgggataaaacgcacagaactaaaacagaagaagcattctcagaaacttctctgtgatgtttgtgttcaactcccagagtttcacattgcttttcatagagtagttctgaaacatgcttttcgtagtgtctgcaagtggacatttggagcgctttcaggcctgtggtggaaaacgaattatggtcacataaaaactggagagaagccttctcagaaacttctctgtgatgattgcattcaactcacagagttgaaccctcctatggatagagcagtgttgaaactctctttttgtggaatctgcaagtggatatgtggacctctccgaagatgtctttggaaacgggaaaatcttcacataaaagctaatcagaagcattctcagaaacttcttggtgatgtttgcattcaaatcccagagttgaaccttcctttgatagttcaggtttgaaacactctttttgtaggatctgcaagtggatatttggaccactctgtggccttcgttcgaaacgggtacatcttcgcataaaatctagacagaagcattctcagaaaatactttgtgatgattgagtttaactcacagagctgaacattcctttggatggagcaggtttgagacacactttttgtaaaatctacaagtggatatttggacctctctgaggatttcgttggaaacgggataactgcacctaactaaacggaagcattctcagaaactgctttgtgatgattgcattcacctcacagagttgaacattgctattgatagagcagtttggaaacactcctgttgtggaatgtgcaagtggagatttggagcgctttgaggcctatggtagtaaagggaataacttcatagaaaaactagacagatgcattctcaggaactttttggtgatgtttgtattcaactcccagagttgaactttcctttggaaagagcagctatgaaacactctttttctagaatctgcaagtggacgtttggagggctttgtggtttgtggtggaaaaggaaatatcttcacctaaatactacatagaagcattctcagaagcttctctgtgatgactgcattcaactcacggagttgaacactccttttgagagcgcagttttgaaactctctttctgtggcatctgcaaggggacatgtagacctctttgaagatttcgttggaaacggaatcatcttcacataaaaactatacagaagcagtctcagaatcttctttgtgatgtttgcattcaaatcccagagttgaactttcctttcaaagttcacgtttgaaacactctttttgcaggatctacaagtggatatttggaccactctgtgtccttcgttcgaaacgggtatatcttcacacgacatctagacagaagctttctcagaaaattctttgggatgattgagtggaactcacagagctgaacattccttgcgatggagcagtttagaaacacactttctgcagaatctgcaagtgcatatttggacctctctgaggaattcgttggaaacgggataatttcagctgactaaacagaagcattctcagaaccttcttcgtgatgtctgcattcaactcacagtgtggaacctttctttgatagttcaggtttgaaacactctttttgtagaaactgcaaggggataattgcacttctttgaggcctaccgtagtaaaggaaataacttcctatagaaagaagacagaagcattctcagaaccctcttcgtgatgtttgcattcaactcacagtgctgaacctttctttgatagttcagctttgaaacactcttcttgtagaaactgcaagtggatatttggtcctctctgaggatttcgttggaaacgggataaaccgcacagaactaaacagaagaattctcagtagccctcttcgtgatgtttgcattcaactcacagtgctgaacctttctttgatagtgcagctttgaaacactctttttgtagaaactgcaagtggatgtttggtcctctctgaggatttcgttggaaacgggataaaccgcacagaactaaaacagaagcattcacagaaaacacttggtgacgactgagtttaactcacagagctgaacattcctttggatggagcagtttcgaaacacactatttgtagaatgtgcaagtggatatgtgggcctctctgaggatttcgttggaaatgggataaaccgcacagaactaaacagaagcattctcagaaactactttgtgatgattgcattcaagtcacagagttgaacattccctttgacagagcagtttggaaactctctttgtgtagaatctgcaagtggagatatggaccgctttgaggcctatggtagtaaaggaaatagcttcatataaaagctagacagtagcattctcagaaacttctttgtgatgcttgcattcaactcacagagttgaactttcctttcgagagagaagctttgaaacactctttttccagaatctgcaagtggacatttggagggctttgaggcctgtggtggaaaaggaattatcttcccgtaaaagctagatagaagcattgtcagaaacttctttgtgatgattgcatacaagtcacagagttgaaggttccttttcaaagagcagtttccaatcactctttctgtggaatctgcaagtggatatttggacctctttgaagatttcgttggaaacgggagaatcttcacagaaaagctaaacagaagcattctcagaaacttctctgtgatgtttgtgttcaactcccagagtttcacgttgcttctcatagagtagttctgaaacatgcttttcgtagtgtctgcaagtggacatttggagcgctttcaggcctgtggtggaaaacgaattatggtcacataaaaactggagagaagccttctcagaaacttctctgtgatgattgcattcaactcacagagttgaaccctcctatggatagagcagtgttgaaactctctttttgtggaatctgcaagtggatatgtggacctctccgaagatgtctttggaaacgggaatatcttcacataaaaactaaacagaagcattctcagaaacttcttggtgatgtttgcattcaaatcccagagttgaaccttcctttgatagttcaggtttgaaacactctttttgtaggatctgcaagtggatatttggaccactctgtggccttcgttcgaaacgggtacatcttcgcataaaatctagacagaagcattctcagaaaatactttgtgatgattgagttgaactcacagagctgaacattcctttggatggagcaggtttgagacacactttttgtagaatctacaagtggatatttggtcctctctgaagatttcgttggaaacgggataactgcacctaactaaacggaagcattctcagaaactgctttgtgatgattgcattcacctcacagagttgaacattcctattgatagagcagtttggaaacactcttgttgtggaatgtgcaagtggagatttggagcgctttgaggcctatggtagtaaagggaatagcttcatagaaaaactagacagatgcattctcaggaactttttggtgatgtttgtattcaactcccagagttgaactttcctttggaaagagcagctatgaaacactgtttttctagaatctgcaagtggacgtttggagggctttgtggtttgtggtggaaaaggaaatatcttcacctaaatactagatagaagcatcctcagaagcttctctgtgatgactgcattcaactcacggagttgaacactccttttgagagcgcagttttgaaactctctttctgtggcatctgcaaggggacatgtagacctctttgaagatttcgttggaaacggaatcatcttcacataaaaactacacagaagcagtctcagaatcttctttgtgatgtttgcattcaaatccccgagttgaactttcctttcaaagttcacgtttgaaacactctttttgcaggatctacaagtggatatttggaccactctgtgtccttcgttcgaaacgggtatatcttcacatgacatctagacagaagctttctcagaaaattctttgggatgattgagttgaactcacagagctgagcattccttgcgatgtagcagtttagaaacacactttctgcagaatctgcaagtgcatatttggacctctgtgaggaattcgttggaaacgggataatttcagctgactaaacagaagcattctcagaaccttcttcgtgatgtctgcattcaactcacagtgtggaacctttctttgatagttcaggtttgaaacactctttttgtagaaactgcaaggggataattgcactctttgaggagtaccgtagtaaaggaaataacttcctataaaaagaagacagaagcattctcagaaccctcttcgtgatgtttgcattcaactcacagtgctgaacctttctttgatagttcagctttgaaacactctttttgtagaaactgcaagtggatatttggtcctctctgagcatttcgttggaaacgggataaactgcacagaactaaacagaagcattctcagaaccttcttcgtgatgtttgcattcaactcacagtgttgaacctttctttgatagttcaggtttgaaacggtctttctgtagaaactgcaagtagatatttggacctctctgaggatttcgttggaaacgggataacccgcacagaactaaaacagaagcattcacagaaaactcttggtgacgactgagtttaactcacagagctgaacattcctttggatggagcagtttcgaaacacactatttgtagaatgtgcaagtggatatttaggcctctctgaggatttcgttggaaacgggataaaccgcacagaactaaacagaagcattctcagaaactacttcgtgatgattgcattcaagtcacagagttgaacattccctttgacagagcagtttggaaactctctttgtgtagaatctgcaagtggagatatggaccgctttgaggcctatggtagtaaaggaaatagcttcatataaaagctagacagtagcattctcagaaacttctttgtgatgcttgcattcaactcacagagttgaactttcctttcgagagagaagctttgaaacactctttttccagaatctgcaagtggacatttggagggctttgaggcctgtggtggaaaaggaattatcttcccgtaaaagctagatagaagcattgtcagaaacttctttgtgatgattgcattcaactcacagagttgaaggttccttttcaaagagcagtttccaatcactctttctgtggaatctgcaagtggatatttggacctattttgaagatttcgttggaaacgggagaatcttcacaggaaagctaaacagaagcattctcagaaacttctctgtgatgtttgtgttcaactcccagagtttcacattgcttttcatagagtagttctgaaacatgcttttcgtagtgtctacaagtggacatttggagcgctttcaggcctgtggtggaaaacgaattatggtcacataaaaactggagagaagccttctcagaaacttctctgtgatgattgcattcaactcacagagttgaaccctcctatggatagagcagtgttgaaactctctttttgtggaatctgcaagtggatatgtggacctctccgaagatgtctttggaaacgggaatatcttcacataaaaactaaacagaagcattctcagaaacttcttggtgatgtttgcattcaaatcccagagttgaaccttcctttgatagttcaggtttgaaacactctttttgtaggatctgcaagtggatatttggaccactctgtggccttcgttcgaaacgggtatatcttcgcataaaatctagacagaagcattctcagaaaatactttgtgatgattgagtttaactcacagagctgaacattcctttggatggagcaggtttgagacacaccttttgtagaatctacaagtggatatttggacctctctgaggatttcgttggaaacgggataactgcacctaactaaacggaagcattctcagaaactgctttgtgatgattgcattcacctcacagagttgaacattcctattgatagagcagtttggaaacactcttgttgtggaatgtgcaagtggagatttggagcgctttgaggcctatggtagtaaagggaatagcttcatagaaaaactagacagatgcattctcaggaactttttggtgatgtttgtattcaactcccagagttgaactttcctttggaaagagcagctatgaaacactctttttctagaatctgcaagtggacgtttggagggctttgtggtttgtggtggaaaaggaaatatcttcacctaaatactagatagaagcattctcagaagcttctctgtgatgactgcattcaactcacggagttgaacactccttttgagagcgcagttttgaaactctctttctgtggcatctgcaaggggacatgtagacctctttgaagatttcgttggaaacggaatcatcttcacatcaaaactatacagaagcagtctcagaatcttctttgtgatgtttgcattcaaatcccagagttgaactttcctttccaagttcacgtttgaaacactctttttgcaggatctgcaagtggatatttggaccactctgtgtccttcgttcgaaacgggtatatcttcacatgacatctagacagaagctttctgagaaaattctttgggatgattgagtggaactcacagagctgaacattccttgcgatgtagcagtttagaaacacactttctgcagaatctgcaagtgcatatttggacctctctgaggaattcgttggaaacgggataatttcagctgactaaacagaagcattctcagaaccttcttcgtgatgtctgcattcaactcacagtgtggaacctttctttgatagttcaggtttgaaatactctttttgtagaaactgcaaggggatcattgcacttctttgaggcctaccgtagtaaaggagataacttcctataaaaagaagacagaagcattctcagaaccctcttcgtgatgtttgcattcaactcacggtgctgaacctttctttgatagttcagctttgaaacactctttttgtagaaactgcaagtggatatttggtcctctctgaggatttcgttggaaacgggataaaccgcacagaactaaacagaagcattctcagaaccttcttcgtgatgtttgcattcaactcacagtgttgaacctttctttgatagttcaggttggaaacggtctttctgtagaaactgcaagtagatatttggacctctctgaggatttcgttggaaacgggataaaccgcacagaactaaaacagaagcattcacagaaaactcttggtgacgactgagtttaactcacagagctgaacattcctttggatggagcagtttcgaaacacactatttgtagaatgtgcaagtggatatgtgggcctctctgaggatttcgttggaaacgggataaaccgcacagaactaaacagaagcattctcagaaactactttgtgatgattgcattcaagtcacagagttgaacattccctttgacagagcagtttggaaactctctttgcgtagaatctgcaagtggagatatggaccgctttgaggcctatggtagtaaaggaaatagcttcatataaaagctagacagcagcattctcagaaacttctttgtgatgcttgcattcaactcacagagttgaactttcctttcgagagagaagctttgaaacactctttttccagaatctgcaagtggacatttggagggctttgaggcctgtggtggaaaaggaattatcttcccgtaaaagctagatagaagcattgtcagaaacttctttgtgatgattgcattcaagtcacagagttgaaggttccttttcaaagagcagtttccaatcactctttctgtggaatctgcaagtggatatttggacctctttgaagatttcgttggaaacgggagaatcttcacagaaaagctaaacagaagcattctcagaaacttctctgtgatgtttgtgttcaactcccagagtttcacattgcttctcatagagtagttctgaaacatgcttttcgtagtgtctgcaagtggacatttggagcgctttcaggcctgtggtggaaaacgaattatggtcacataaaaactggagagaagccttctcagaaacttctctgtgatgattgcattcaactcacagagttgaaccctcctatggatagagcagtgttgaaactctctttttgtggaatccgcaagtggatatgtggacctctccgaagatgtctttggaaacgggaatatcttcacataaaaactaaacagaagcattctcagaaacttcttggtgatgtttgcattcaaatcccagagttgaaccttcctttgagagttcaggtttgaaacactctttttgtaggatctgcaagtggatatttggaccactctgtggccttcattcgaaacgggtacatcttcgcataaaatctagacagaagcattcacagtaaaatactttgtgatgattgagttgaactcacagagctgaacattcctttggatggagcaggtttgagacacactttttgtagaatctacaagtggatatttggacctctctgaggatttcgttggaaacgggataactgcacctaactaaacggaagcattctcagaaactgctttgtgatgattgcattcacctcaccagagttgaacattcctattgatagagcagtttggaaacactcttgttgtggaatgtgcaagtggagatttggagcgctttgaggcctatggtagtaaagggaatagcttcatagaaaaactagacagatgcattctcaggaactttttggtgatgtttgtattcaactcccagcagttgaactttcctttggaaagagcagctatgaaacactctttttctagaatctggaagtggacgtttggagggctttgtggtttgtggtggaaaaggaaatatcttcacctaaatactagatagaagcattctcagaagcttctctgtgatgactgcattcaactcacggagttgaacactccttttgagagcgcagttttgaaactctctttctgtggcatctgcaaggggacatgtagacctctttgaagatttcgttggaaacggaatcatcttcacatagaaactatacagaagcagtctcagaatcttctttgtgatgtttgcattcaaatcccagagttgaactttcctttcaaagttcacgtttgaaacactctttttgcaggatctacaagtggatatttggaccactctgtgtccttcgttcgaaacgggtatatcttcacatgacatctagacagaagctttctcagaaaattctttgggatgattgagtggaactcacagagctgaacattccttgcgatgtagcagtttagaaacacactttctgcagaatctgcaagtgcatatttggacctctctgaggaattcgttggaaacgggataatttcagctgactaaacagaagcattctcagaaccctcttcgtgatgtttgcattcaactcacagtgtggaacctttctttgatagttcaggtttgaagcactctttttgtagaaactgcaaggggatcattgcacttctttgaggcctaccgtagtaaaggaaataacttcctatagaaagaagacagaagcattctcagaaccttcttcgtgatgtttgcattcaactcacagtgttgaacctttctttgatagttcaggtttgaaaaggtctttctgtagaaactgcaagtagatatttggacctctctgaggatttcgttggaaacgggataaaccgcacagaactaaaacagaagcattcacagaaaactcttggtgacgactgagtttaactcacagagctgaacattcctttggatggagcagtttcgaaacgcactatttgtagaatgtgcaagtggatatttgggcctctctgaggatttcgttggaaacgggataaaccgcacagaactaaagagaagcattctcagaaactactttgtgatgattgcattcaagtcacagagttgaacattccctttgacagagcagtttggaaactctctttgtgtagaatctgcaagtggagatatggaccgctttgaggcctatggtagtaaaggaaatagcttcatataaaagctagacagtagcattctcagaaacttctttgtgatgcttgcattcaactcacagagttgaactttcctttcgagagagaagctttgaaacactctttttccagaatctgcaagtggacatttggagggctttgaggcctgtggtggaaaaggaattatcttcccgtaaaagctagatagaagcattgtcagaaacttctttgtgatgattgcattcaactcacagagttgaaggttccttttcaaagagcagtttccaatcactctttctgtggaatctgcaagtggatatttcgacctattttgaagatttcgttggaaacgggagaatcttcacagaaaagctaaacagaagcattctcagaaacttctctgtgatgtttgtgttcaactcccagactttcacattgcttttcatagagtagttctgaaacatgcttttcgtagtgtctacaagtggacatttggagcgcttccagtcctgtggtggaaaacgaattatggtcacataaaaactggagagaagctttctcagaaacttctctgtgatgattgcattcaactcacagagttgaaccctcctatggatagagcagtgttgaaactctctttttgtggaatctgcaagtggatatgtggacctctccgaagatgtctttggaaacgggaatatcttcacataataactaaacagaagcattctcagaaacttcttcgtgatgtttgcattcaaatcccagagttgaaccttcctttgagagttcaggtttgaaacactctttttgtaggatctgcaagtggatatttggaccactctgtggccttcgttcgaaacgggtacatcttcgcataaaatctagacagaagcattctcagaaaatactttttgatgactgagttgaactcacagagctgaacattcctttggatggagcaggtttgagacacactttttgtagaatctacaagtggatatttggacctctctgaggatttcgttggaaacgggataactgcacctaactaaacggaagcattctcagaaactgctttgtgatgattgcattcacctcacagagttgaacattcctattgatagagcagtttggaaacactcttcttgtggaatgtgcaagtggagatttggagcgctttgaggcctatggtagtaaagggaatagcttcatagaaaaactagacagatgcattctcaggaactttttggtgatgtttgtattcaactcccagagttgaactttcctttggaaagagcagctatgaaacactctttttctagaatctgcaagtggacgtttggagggctttgtggtttgtggtggaaaaggaatatcttcacctaaatactagatagaagcattctcagaagcttctctgtgatgactgcattcaactcacggagttgaacactccttttgagagcgcagttttgaaactctctttctgtggcatctgcaaggggacatgtagacctctttgaagatttcgttggaaacggaatcatcttcacataaaaactatacagaagcagtctcagaatcttctttgtgatgtttgcattcaaatcccagagttgaactttcctttcaaagttcacgtttgaaacactctttttgcaggatctacaagtggatatttggaccactctgtgtccttcgttcgaaacgggtatatcttcacacgacatctagacagaagctttctcagaaaattctttgggatgattgagtggaactcacagagctgaacattccttgcgatgtagcagtttagaaacacactttctgcagaatctgcaagtgcatatttggacctctctgaggaattcgttggaaacgggataatttcagctgactaaacagaagcattctcagaaccttcttcgtgatgtctgcattcaactcacagtgtggaacctttctttgatagttcaggtttgaaacactctttttgtagaaactgcaaggggataattgcacttctttgaggcctaccgtagtaaaggaaataacttcctatagaaagaagacagaagcattctcagaaccctcttcgtgatgtttgcattcaactcacagtgctgaacctttctttgatagttcagctttgaaacactcttcttgtagaaactgcaagtggatatttggtcctctctgaggatttcgttggaaacgggataaaccgcacagaactaaacagaagaattctcagagccctcttcgtgatgtttgcattcaactcacagtgctgaacctttctttgatagtgcagctttgaaacactctttttgtagaaactgcaagtggatgtttggtcctctctgaggatttcgttggaaacgggataaaccgcacagaactaaaacagaagcattgtcagaaacttctttgtgatgattgcattcaactcacagagttgaaggttccttttcaaacagcagtttccaatcactctttctgtggaatctgcaagtggatatttgggcctctctgaggatttcgttggaaacgggataaaacgcacagaactaaaacagaagcattctcagaaacttctctgtgatgtttgtgttcaactcccagagtttcacgttgcttttcatagagtagttctgaaacatgcttttcgtagtgtctgcaagtggacatttggagcgctttcaggcctgtggtggaaaacgaattatggtcacataaaaactggagagaagccttctcagaaacttctctgtgatgattgcattcaactcacagagttgaaccctcctatggatagagcagtgttgaaactctctttttgtggaatctgcaagtggatatgtggacctctccgaagatgtctttggaaacgggaatatcttcacataaaaactaaacagaagcattctcagaaacttcttggtgatgtttgcattcaaatcccagagttgaaccttcctttgatagttcaggtttgaaacactctttctgtaggatctgcaagtggctatttggaccactctgtggccttcgttcgaaacgggtatatcttcgcataaaatctagacagaagcattctcagaaaatactttgtgatgattgagtttaaatcacagagctgaccattcctttggatggagcaggtttgagacacactttttgtagaatctacaagtggatatttggacctctctgaggatttcgttggaaacgggataactgcacctaactaaacggaagcattctcagaaactgctttgtgatgattgcattcacctcacagagttgaacattcctattgatagagcagtttggaaacactcttgttgtggaatgtgcaagtggagatttggagcgctttgaggcctatggtagtaaagggaatagcttcatagaaaaactagacagatgcattctcaggaactttttggtgatgtttgtattcaactcccagagttgaactttcctttggaaagagcagctatgaaacactctttttctagaatctgcaagtggacgtttggagggctttgtggtttgtggtggaaaaggaaatatcttcacctaaatactagatagaagcattctcagaagcttctctgtgatgactgcattcaactcacggagttgaacactccttttgagagtgcagttttgaaactctctttctgtggcatctgcaagagagacatgtagacctctctgaagatttcgttggaaacggaatcatcttcacatacaaactatacagaagcagtctcagaatcttctttgtgatgtttgcattcaaatcccagagttgaactttcctttcaaagttcacgtttgaaacactctttttgcaggatctacaagtggatatttggaccactctgtgtccttcgttcgaaacgggtatatcttcacacgacatctagacagaagctttctcagaaaattctttgggatgattgagttgaactcacagagctgaacattccttgcgatgtagcagtttagaaacacactttctgcagaatctgcaagtgcatatttggacctctctgaggaattcgttggaaacgggataatttcagctgactaaacagaagcattctcagaaccttcttcgtgatgtctgcattcaactcacagtgtggaacctttctttgatagctcaggtttgaaacactctttttgtagaaactgcaaggggataattgcacttctttgaggcctaccgtagtaaaggaaataacttcctatagaaagaagacagaagcattctcagaaccctcttcgtgatgtttgcattcaactcacagtgctgaacctttctttgatagttcagctttgaaacactcttcttgtagaaactgcaagtggatatttggtcctctctgaggatttcgttggaaacgggataaaccgcacagaactaaacagaagaattctcagagccctcttcgtgatgtttgcattcaactcacagtgctgaacctttctttgatagtgcagctttgaaacactctttttgtagaaactgcaagtggatatttggtcctctctgaggatttcgttggaaacgggataaaccgcacagaactaaaacagaagcattcacagaaaactcttggtgacgactgagtttaactcacagagctgaacattcctttggatggagcagtttcgaaacacactatttgtagaatctgcaagtggatatttgggcctctctgaggatttcgttggaaacgggataaaacgcacagaactaaaacagaagcattctcagaaactactttgtgatgattgcattcaagtcacagagttgaacattccctttgacagagcagtttggaaactctctttgtgtagaatctgcaagtggagatatggaccgctttgaggcctatggtagtaaaggaaatagcttcatataaaagctagacagtagcattctcagaaacttctttgtgatgcttgcattcaactcacagagttgaactttcctttcgagagagaagctttgaaacactctttttccagaatgtgcaagtggacatttggggagctttgaggcctggggtggaaaaggaattatcttcccgtaaaagctagatagaagcattgtcagaaacttctttgtgatgactgcattcaactcacagagttgaaggttccttttcaaacagcagtttccaatcactctttctgtggaatctgcaagtggatatttcgacctctttgaagatttcgttggaaacgggagaatcttcacagaaaagctaaacagaagcattctcagaaacttctctgtgatgtttgtgttcaactcccagagtttcacgttgcttttcatagagtagttctgaaacatgcttttcgtagtgtctgcaagtggacatttggagcgctttcaggcctgtggtggaaaacgaattatggtcacataaaaactggagagaagccttctcagaaacttctctgtgatgattgcattcaactcacagagttgaaccctcctatggatagagcagtgttgaaactctctttttgtggaatctgcaagtggatatgtggacctctccgaagatgtctttggaaacgggaatatcttcacataaaaactaaacagaagcattctcagaaacttcttggtgatgtttgcattcaaatcccagagttgaaccttcctttgatagttcaggtttgaaacactctttctgtaggatctgcaagtggctatttggaccactctgtggccttcgttcgaaacgggtatatcttcgcataaaatctagacagaagcattctcagaaaatactttgtgatgattgagtttaaatcacagagctgaccattcctttggatggagcaggtttgagacacactttttgtagaatctacaagtggatatttggacctctctgaggatttcgttggaaacgggataactgcacctaactaaacggaagcattctcagaaactgctttgtgatgattgcattcacctcacagagttgaacattcctattgatagagcagtttggaaacactcttgttgcggaatgtgcaagtggagatttggagcgctttgaggcctgtggtagtaaagggaatagcttcatagaaaaactagacagatgcattctcaggaactttttggtgatgtttgtattcaactcccagagttgaactttcctttggaaagagcagctatgaaacactctttttctagaatctgcaagtggacgtttggagggctttgtggtttgtggtggaaaaggaaatatcttcacctaaatactagatagaagcattctcagaagcttctctgtgatgactgcattcaactcacggagttgaacactccttttgagagcgcagttttgaaactctctttctgtggcatctgcaaggggacatgtagacctctttgaagatttcgttggaaacggaatcatcttcacataaaaactatacagaagcagtctcagaatcttctttgtgatgtttgcattcaaatcccagagttgaactttcctttcaaagttcacgtttgaaacactctttttgcaggatctacaagtggatatttggaccactctgtgtccttcgttcgaaacgggtatatcttcacacgacatctagacagaagctttctcagaaaattctttgggatgattgagtggaactcacagagctgaacattccttgcgatgtagcagtttagaaacacactttctgcagaatctgcaagtgcatatttggacctctctgaggaattcgttggaaacgggataatttcagctgactaaacagaagcattctcagacacccttcttcgtgatgtctgcattcaactcacagtgtggaacctttctttgatagttcaggtttgaaacactctttttgtagaaactgcaaggggataattgcacttctttgaggcctaccgtagtaaaggaaataacttcctatagaaagaagacagaagcattctcagaaccctcttcgtgatgtttgcattcaactcacagtgctgaacctttctttgatagttcagctttgaaacactcttcttgtagaaactgcaagtggatatttggtcctctctgaggatttcgttggaaacgggataaaccgcacagaactaaacagaagaattctcagagccctcttcgtgatgtttgcattcaactcacagtgctgaacttttctttgatagtgcagctttgaaacactctttttgtagaaactgcaagtggatgtttggtcctctctgaggatttcgttggaaacgggataaaccgcacagaactaaaacagaagcattgtcagaaacttctttgtgatgattgcattcaactcacagagttgaaggttccttttcaaacagcagtttccaatcactctttctgtggaatctgcaagtggatatttgggcctctctgaggatttcgttggaaacgggataaaacgcacagaactaaaacagaagcattctcagaaacttctctgtgatgtttgtgttcaactcccagagtttcacgttgcttttcatagagtagttctgaaacatgcttttcgtagtgtctgcaagtggacatttggagcgctttcaggcctgtggtggaaaacgaattatggtcacataaaaactggagagaagccttctcagaaacttctctgtgatgattgcattcaactcacagagttgaaccctcctatggatagagcagtgttgaaactctctttttgtggaatctgcaagtggatatgtggacctctccgaagatgtctttggaaacgggaatatcttcacataaaaactaaacagaagcattctcagaaacttcttggtgatgattgcattcaaatcccagagttgaaccttcctttgatagttcaggtttgaaacactctttctgtaggatctgcaagtggctatttggaccaccctgtggccttcgttcgaaacgggtatatcttcgcataaaatctagacagaagcattctcagaaaatactttgtgatgattgagtttaactcacagagctggacattcctttggatggaacaggtttgagacacactttttgtagaatctacaagtggatatttggacctctctgaggatttcgttggaaacgggataactgcacctaactaaacggaagcattctcagaaactgctttgtgatgattgcattcacctcacagagttgaacattcctattgatagagcagtttggaaacactcttgttgtggaatgtgcaagtggtgatttggagcgctttgaggcctatggtagtaaagggaatagcttcatagaaaaactagacagatgcattctcaggaactttttggtgatgtttgtattcaactcccagagttgaactttcctttggaaagagcagctatgaaacactctttttctagaatctgcaagtggacgtttggagggctttgtggtttgtggtggaaaaggaaatatcttcacctaaatactagatagaagcattctcagaagcttctctgtgatgactgcattcaactcacggagttgaacactccttttgagagcgcagttttgaaactctctttctgtggcatctgcaaggggacatgtagacctctttgaagatttcgttggaaacggaatcatcttcacataaaaactatacagaagcagtctcagaatcttctttgtgatgtttgcattcaaatcccagagttgaactttcctttcaaagttcacgtttgaaacactctttttgcaggatctacaagtggatatttggaccactctgtgtccttcgttcgaaacgggtatatcttcacacgacatctagacagaagctttctcagaaaattctttgggatgattgagtggaactcacagagctgaacattccttgcgatgtagcagtttagaaacacactttctgcagaatctgcaagtgcatatttggacctctctgaggaattcgttggaaacgggataatttcagctgactaaacagaagcattctcagaaccttcttcgtgatgtctgcattcaactcacagtgtggaacctttctttgatagttcaggtttgaaacactctttttgtagaaactgcaaggggataattgcacttctttgaggcctaccgtagtaaaggaaataacttcctatagaaagaagacagaagcattctcagaaccctcttcgtgatgtttgcattgaactcacagtgctgaacctttctttgatagttcagctttgaaacactcttcttgtagaaactgcaagtggatatttggtcctctctgaggatttcgttggaaacgggataaaccgcacagaactaaacagaagcattctcagaaccttcttcgtgatgtttgcattcaactcacagtgttgaacctttctttgatagttcaggtttgaaacggtctttctgtagaaactgcaagtagatatttggacctctctgaggatttcgttggaaacgggataaaccgcacagaactaaaacagaagcattcacagaaaactcttggtgacgactgagtttaactcacagagctgaacattcctttggatggagcagtttcgaaacacactatttgtagaatgtgcaagtggatatttgggcctctctgaggatttcgttggaaacgggataaaccgcacagaactaaacagaagcattctcagaaactactttgtgatgattgcattcaagtcacagtagttgaacattccctttgacagagcagtttggaaactctctttgtgtagaatctgcaagtggagatatggaccgctttgaggcctatggtagtaaaggaaatagcttcatataaaagctagacagtagcattctcaggaccttctttgtgatgcttgcattcaactcacagagttgaactttcctttcgagagagaagctttgaaacactctttttccagaatgtgcaagtggacatttggagggctttgaggcctgtggtggaaaaggaattatcttcccgtaaaagctagatagaagcattgtcagaaacttctttgtgatgattgcattcaactcacagagttgaaggttcctttccaaacagcagtttccaaacactctttctgtggaatctgcaagtggatatttggacctctttgaagatttcgttggaaacgggagaatcttcacagaaaagctaaacagaagcattctcagaaacttctctgtgatgtttgtgttcaactcccagagtttcacattgcttctcatagagtagttctgaaacatgcttttcgtagtgtctgcaagtggtcatttggagcgctttccggcctgtggtggaaaacgaattatggtcacataaaaactggagagaagccttctcagaaacttctctgtgatgattgcattcaactcacagagttgaaccctcctatggatagagcagtgttgaaactctctttttgtggaatctgcaagtggatatgtggacctctccgaagatgtctttggaaacgggaatatcttcacataaaaactaaacagaagcattctcagaaacttcttggtgatgtttctattcaaatcccagagttgaaccttcctttgagagttcaggtttgaaacactctttttgtaggatctgcaagtggatatttggaccactctgtggccttcgttcgaaacgggtacatcttcgaataaaatctagacagaagcattctcagaaaatactttgtgatgattgagttgaactcacagagctgaacattcctttggatggagcaggtttgagacacactttttgtagaatctacaagtggatatttggacctctctgaggatttcgttggaaacgggataactgcacctaactaaacggaagcattctcagaaactgctttgtgatgattgcattcacctcacagagttgaacattcctattgatagagcagtttgaaaacactcttcttgtggaatgtgcaagtggagatttggagcgctttgaggcctatggtagtaaagggaatagcttcatagaaaaattagacagatgcattctcaggaactttttggtgatgtttgtattcaactcccagagttgaactttcctttggaaagagcagctatgaaacactctttttctagaatctgcaagtggacgtttggagggctttgtggtttgtggtggaaaaggaaatatcttcacctaaatactagatagaagcattctcagaagcttctctgtgatgactgcattcaactcacggagttgaacactccttttgagagcgcagttttgaaactctctttctgtggcatctgcaaggggacatgtagacctctttgaagatttcgttggaaacggaatcatcttcacataaaaactatacagaagcagtctcagaatcttctttgtgatgtttgcattcaaatcccagagttgaactttcctttcaaagttcacgtttgaaacactctttttgcaggatctacaagtggatatttggaccactctgtgtccttcgttcgaaacgggtatatcttcacacgacatctagacagaagctttctcagaaaattctttgggatgattgagtggaactcacagagctgaacattccttgcgatgtagcagtttagaaacacactttctgcagaatctgcaagtgcatatttggacctctctgaggaattcgttggaaacgggataatttcagctgactaaacagaagcattctcagaaccttcttcgtgatgtctgcattcaactcacagtgtggaacctttctttgatagttcaggtttgaaacactctttttgtagaaactgcaaggggataattgcacttctttgaggcctaccgtagtaaaggaaataacttcctatagaaagaagacagaagcattctcagaaccctcttcgtgatgtttgcattcaactcacagtgctgaacctttctttgatagttcagctttgaaacactcttcttgtagaaactgcaagtggatatttggtcctctctgaggatttcgttggaaacgggataaaccgcacagaactaaacagaagaattctcagagccctcttcgtgatgtttgcattcaactcacagtgctgaacctttctttgatagtgcagctttgaaacactctttttgtagaaactgcaagtggatgtttggtcctctctgaggatttcgttggaaacgggataaaccgcacagaactaaaacagaagcattgtcagaaacttctttgtgatgattgcattcaactcacagagttgaaggttccttttcaaacagcagtttccaatcactctttctgtggaatctgcaagtggatatttgggcctctctgaggatttcgttggaaacgggataaaacgcacagaactaaaacagaagcattctcagaaacttctctgtgatgtttgtgttcaactcccagagtttcacgttgcttttcatagagtagttctgaaacatgcttttcgtagtgtctgcaagtggacatttggagcgctttcaggcctgtggtggaaaacgaattatggtcacataaaaactggagagaagccttctcagaaacttctctgtgatgattgcattcaactcacagagttgaaccctcctatggatagagcagtgttgaaactctctttttgtggaatctgcaagtggatatgtggacctctccgaagatgtctttggaaacgggaatatcttcacataaaaactaaacagaagcattctcagaaacttcttggtgatgtttgcattcaaatcccagagttgaaccttcctttgatagttcaggtttgaaacactctttctgtaggatctgcaagtggctatttggaccactctgtggccttcgttcgaaacgggtatatcttcgcataaaatctagacagaagcattctcagaaaatactttgtgatgattgagtttaaatcacagagctgaccattcctttggatggagcaggtttgagacacactttttgtagaatctacaagtggatatttggacctctctgaggatttcgttggaaacgggataactgcacctaactaaacggaagcattctcagaaactgctttgtgatgattgcattcacctcacagagttgaacattcctattgatagagcagtttggaaacactcttgttgtggaatgtgcaagtggagatttggagcgctttgaggcctatggtagtaaagggaatagcttcatagaaaaactagacagatgcattctcaggaactttttggtgatgtttgtattcaactcccagagttgaactttcctttggaaagagcagctatgaaacactctttttctagaatctgcaagtggacgtttggagggctttgtggtttgtggtggaaaaggaaatatcttcacctaaatactagatagaagcattctcagaagcttctctgtgatgactgcattcaactcacggagttgaacactccttttgagagcgcagttttgaaactctctttctgtggcatctgcaaggggacatgtagacctctttgaagatttcgttggaaacggaatcatcttcgcataaaaactatacagaagcagtctcaagaatcttctttgtgatgtttgcattcaaatcccagagttgaactttcctttcaaagttcacgtttgaaacactctttttgcaggatctacaagtggatatttggaccactctgtgtccttcgttcgaaacgggtatatcttcacatgacatctagacagaagctttctcagaaaattctttgggatgattgagttgagcaaacagagctgaacactccttgcgatgtagcagtttagaaacacactttctgcagaatctgcaagtgcatatgtggacctctctgaggaattcgttggaaacgggataatttcagctgactaaacagaagcattctcagaaccttcttcgtgatgtctgcattcaactcacagtgtggaacctttctttgatagttcaggtttgaaacactctttttgtagaaactgcaaggggatcattgcacttctttgaggcctaccgtagtaaaggagataacttactataaaaagaagacagaagcattctcagagccctcttcgtgatgtttgcattcaactcacagtgctgaacctttctttgatagtgcagctttgaaacactctttttgtagaaactgcaagtggatgtttggtcctctctgaggatttcgttggaaacgggataaaccgcacagaactaaaacagaagcattgtcagaaacttctttgtgatgattgcattcaactcacagagttgaaggttccttttcaaacagcagtttccaatcactctttctgtggaatctgcaagtggatatttgggcctctctgaggatttcgttggaaacgggataaaacgcacagaactaaaacagaagcattctcagaaacttctctgtgatgtttgtgttcaactcccagagtttcacgttgcttttcatagagtagttctgaaacatgcttttcgtagtgtctgcaagtggacatttggagcgctttcaggcctgtggtggaaaacgaattatggtcacataaaaactggagagaagccttctcagaaacttctctgtgatgattgcattcaactcacagtagttgaaccctcctatggatagagcagtgttgaaactctctttttgtggaacctgcaagtggatatgtggacctctccgaagatgtctttggaaacgggaatatcttcacataaaaactaaacagaagcattctcagaaacttcttggtgatgtttgcattcaaatcccagaggtgaaccttcctttgatagttcaggtttgaaacactctttttgtaggatctgcaagtggctatttggaccactctgtggccttcgttagaaacgggtatatcttcgcataaaatctagacagaagcattctcagaaaatactttgtgatgattgagtttaactcacggagctgaacattcctttggatggagcaggtttgagacacactttttgtagaatctacaagtggatattgggacctctctgaggatttcgttggaaacgcgataactgcacctaactaaacggaagcattctcagaaactgctttgtgatgattgcattcacctcacagagttgaacattcctattgatagagcagtttggaaacactcttgttgtggaatgtgcaagtggagatttggagcgctttgaggcctatggtagtaaagggaatagcttcatagaaaaactagacagatgcattctcaggaactttttggtgatgtttgtattcaactcccagagttgaactttcctttggaaagagcagctatgaaacactctttttctagaatctgcaagtggacgtttggagggctttgtggtttgtggtggaaaaggaaatatcttcacctaaatactagatagaagcattctcagaagcttctctgtgatgactgcattcaactcacggagttgaacactccttttgagagcgcagttttgaaactctctttctgtggcatctgcaaggggacatgtagacctctttgaagatttcgttggaaacggaatcatcttcacatcaaaactatacagaagcagtctcagaatcttctttgtgatgtttgcattcaaatcccagagttgaactttcctttcaaagttcacgtttgaaacactctttttgcaggatctacaagtggatatttggaccactctgtgtccttcgttcgaaacgggtatatcttcacacgacatctagacagaagctttctcagaaaattctttgggatgattgagtggaactcacagagctgaacattccttgcgatgtagcagtttagaaacacactttctgcagaatctgcaagtgcatatttggacctctctgaggaattcgttggaaacgggataatttcagctgactaaacagaagcattctcagaaccttcttcgtgatgtctgcattcaactcacagtgtggaacctttctttgatagttcaggtttgaaacactctttttgtagaaactgcaaggggataattgcacttctttgaggcctaccgtagtaaaggaaataacttcctatagaaagaagacagaagcattctcagaaccctcttcgtgatgtttgcattcaactcacagtgctgaacctttctttgatagttcagctttgaaacactcttcttgtagaaactgcaagtggatatttggtcctctctgaggatttcgttggaaacgggataaaccgcacagaactaaacagaagaattctcagagccctcttcgtgatgtttgcattcaactcacagtgctgaacctttctttgatagtgcagctttgaaacactctttttgtagaaactgcaagtggatgtttggtcctctctgaggatttcgttggaaacgggataaaccgcacagaactaaaacagaagcattgtcagaaacttctttgtgatgattgcattcaactcacagagttgaaggttccttttcaaacagcagtttccaatcactctttctgtggaatctgcaagtggatatttgggcctctctgaggatttcgttggaaacgggataaaacgcacagaactaaaacagaagcattctcagaaacttctctgtgatgtttgtgttcaactcccagagtttcacgttgcttttcatagagtagttctgaaacatgcttttcgtagtgtctgcaagtggacatttggagcgctttcaggcctgtggtggaaaacgaattatggtcacataaaaactggagagaagccttctcagaaacttctctgtgatgattgcattcaactcacagagttgaaccctcctatggatagagcagtgttgaaactctctttttgtggaatctgcaagtggatatgtggacctctccgaagatgtctttggaaacgggaatatcttcacataaaaactaaacagaagcattctcagaaacttcttggtgatgtttgcattcaaatcccagagttgaaccttcctttgatagttcaggtttgaaacactctttctgtaggatctgcaagtggctatttggaccactctgtggccttcattcgaaacgggtatatcttcgcataaaatctagacagaagcattctcagaaaatactttgtgatgattgagtttaaatcacagagctgaacattcctttggatggagcaggtttgagacacactttttgtagaatctacaagtggatatttgcacctctctgaggatttcattggaaacgggataactgcacctaactaaacggaagcattctcagaaactgctttgtgatgattgcattcacctcacagagttgaacattcctattgatagagcagtttggaaacactcttgttgtggaatgtgcaagtggagatttggagcgctttgaggcctatggtagtaaagggaatagcttcatagaaaaactagacagatgcattctcaggaactttttggtgatgtttgtattcaactcccagagttgaactttcctttggaaagagcagctatgaaacactctttttctagaatctgcaagtggacgtttggagggctttgtggtttgtggtggaaaaggaaatatcttcacctaaatactagatagaagcattctcagaagcttctctgtgatgactgcattcaactcacggagttgaacactccttttgagagcgcagttatgaaactccctttctgtggcatctgcaaggggacatgtagacctctttgaagatttcgttggaaacggaatcatcttcacataaaaactatacagaagcagtctcagaatcttctttgtgatgtttgcattcaaatcccagagttgaactttcctttcaaagttcacgtttgaaacactctttttgcaggatctacaagtggatatttggaccactctgtgtccttcgttcgaaacgggtatatcttcacacgacatctagacagaagctttctcagaaaattctttgggatgattgagtggaactcacagagctgaacattccttgcgatggagcagtttagaaacacactttctgcagaatctgcaagtgcatatttggacctctctgaggaattcgttggaaacgggataatttcagctgactaaacagaagcattctcagaaccttcttcgtgatgtctgcattcaactcacagtgtggaacctttctttgatagttcaggtttgaaacactctttttgtagaaactgcaaggggataattgcacttctttgaggcctaccgtagtaaaggaaataacttcctatagaaagaagacagaagcattctcagaaccctcttcgtgatgtttgcattcaactcacagtgctgaacctttctttgatagttcagctttgaaacactcttcttgtagaaactgcaagtggatatttggtcctctctgaggatttcgttggaaacgggataaaccgcacagaactaaacagaagaattctcagagccctcttcgtgatgtttgcattcaactcacagtgctgaacctttctttgatagtgcagctttgaaacactctttttgtagaaactgcaagtggatgtttggtcctctctgaggatttcgttggaaacgggataaaccgcacagaactaaaacagaagcattgtcagaaacttctttgtgatgattgcattcaactcacagagttgaaggttccttttcaaacagcagtttccaatcactctttctgtggaatctgcaagtggatatttgggcctctctgaggatttcgttggaaacgggataaaacgcacagaactaaaacagaagcattctcagaaacttctctgtgatgtttgtgttcaactcccagagtttcacgttgcttttcatagagtagttctgaaacatgcttttcgtagtgtctgcaagtggacatttggagcgctttcaggcctgtggtggaaaacgaattatggtcacataaaaactggagagaagccttctcagaaacttctctgtgatgattgcattcaactcacagagttgaaccctcctatggatagagcagtgttgaaactctctttttgtggaatctgcaagtggatatgtggacctctccgaagatgtctttggaaacgggaatatcttcacataaaaactaaacagaagcattctcagaaacttcttggtgatgtttgcattcaaatcccagagttgaaccttcctttgatagttcaggtttgaaacactctttctgtaggatctgcaagtggctatttggaccactctgtggccttcgttcgaaacgggtatatcttcgcataaaatctagacagaagcattctcagaaaatactttgtgatgattgagtttaactcacagagctgaacattcctttggatggagcaggtttgagacacaccttttgtagaatctacaagtggatatttggacctctctgaggatttcgttggaaacgggataactgcacctaactaaacggaagcattctcagaaactgctttgtgatgattgcattcacctcacagagttgaacattcctattgatagagcagtttggaaacactcttgttgtggaatgtgcaagtggagatttggagcgctttgaggcctgtggtagtaaagggaatagcttcatagaaaaactagacagatgcattctcaggaactttttggtgatgtttgtattcaactcccagagttgaactttcctttggaaagagcagctatgaaacactgtttttctagaatctgcaagtggacgtttggagggctttgtggtttgtggtggaaaaggaaatatcttcacctaaatactagatagaagcatcctcagaagcttctctgtgatgactgcattcaactcacggagttgaacactccttttgagagcgcagttttgaaactctctttctgtggcatctgcaaggggacatgtagacctctttgaagatttcgttggaaacggaatcatcttcacataaaaactatacagaagcagtctcagaatcttctttgtgatgtttgcattcaaatccccgagttgaactttcctttcaaagttcacgtttgaaacactctttttgcaggatctacaagtggatatttggaccactctgtgtccttcgttcgaaacgggtatatcttcacatgacatctagacagaagctttctcagaaaattctttgggatgattgagttgaactcacagagctgagcattccttgcgatgtagcagtttagaaacacactttctgcagaatctgcaagtgcatatttggacctctgtgaggaattcgttggaaacgggataatttcagctgactaaacagaagcattctcagaaccttcttcgtgatgtctgcattcaactcacagtgtggaacctttctttgatagttcaggtttgaaacactctttttgtagaaactgcaaggggataattgcactctttgaggagtaccgtagtaaaggaaataacttcctataaaaagaagacagaagcattctcagaaccctcttcgtgatgtttgcattcaactcacagtgctgaacctttctttgatagttcagctttgaaacactctttttgtagaaactgcaagtggatatttggtcctctctgagcatttcgttggaaacgggataaactgcacagaactaaacagaagcattctcagaaccttcttcgtgatgtttgcattcaactcacaagtgttgaacctttctttgatagttcaggtttgaaacggtctttctgtagaaactgcaagtagatatttggacctctctgaggatttcgttggaaacgggataacccgcacagaactaaaacagaagcattcacagaaaactcttggtgacgactgagtttaactcacagagctgaacattcctttggatggagcagtttcgaaacacactatttgtagaatgtgcaagtggatatttgggcctctctgaggatttcgttggaaacgggataaaccgcacagaactaaacagaagcattctcagaaactactttgtgatgattgcattcaagtcacagagttgaacattccctttgacagagcagtttggaaactctctttgtgtagaatctgcaagtggagatatggaccgctttgaggcctatggtagtaaaggaaatagcttcatataaaagctagacagtagcattctcagaaacttctttgtgatgcttgcattcaactcacagagttgaactttccttttgagagagaagctttgaaacactctttttccagaatgtgcaagtggacatttggagggctttgaggcctgtggtggaaaaggaattatcttcccgtaaaagctagatggaagcattgtcagaaacttctttgtgatgattgcattcaactcacagagttgaaggttccttttaaacagcagtttccaatcactctttctgtggaatctgcaagtggatatttggacctattttgaagatttcgttggaaacgggagaatcttcacagaaaagctaaacagaagcattctcagaaacttctctgtgatatttgtgttcaactcccagagtttcacgttgcttttcatagagtagttctgaaacatgcttttcgtagtgtctgcaagtggacatttggagcgctttcaggcctgtggtggaaaacgaattatggttacataaaaactggagagaagccttctcagaaacttctctgtgatgattgcattcaactcacagagttgaaccctcctatggatagagcagtgttgaaactctctttttgtggaatctgcaagtggatatgtggacctctccgaagatgtctttggaaacgggaatatcttcacataaaaactaaacagaagcattctcagaaacttcttggtgatgtttgcattcaaatcccagagttgaaccttcctttgatagttcaggtttgaaacactctttttgtaggatctgcaagtggatatttggaccactctgtggccttcgttcgaaacgggtatatcttcgcataaaatctagacagaagcattctcagaaaatactttgtgatgattgagtttaactcacagagctgaacattcctttggatggagcaggtttgagacacactttttgtagaatctacaagtggatatttggacctctctgaggatttcgttggaaacgcgataactgcacctaactaaacggaagcattctcagaaactgctttgtgatgattgcattcacctcacagagttgaacattcctattgatagagcagtttggaaacactcttgttgtggaatgtgcaagtggagatttggagcgctttgaggcctatggtagtaaagggaatagcttcatagaaaaactagacagatgcattctcaggaactttttggtgatgtttgtattcaactcccagagttgaactttcctttggaaagagcagctatgaaacactgtttttctagaatctgcaagtggacgtttggagggctttgtggtttgtggtggaaaaggaaatatcttcacctaaatactagatagaagcatcctcagaagcttctctgtgatgactgcattcaactcacggagttgaacactccttttgagagcgcagttttgaaactctctttctgtggcatctgcaaggggacatgtagacctctttgaagatttcgttggaaacggaatcatcttcacataaaaactatacagacagtctcagtaatcttctttgtgatgtttgcattcaaatcccagagttgaactttcctttcaaagttcacgtttgaaacactctttttgcaggatctacaagtggatatttggaccactctgtgtccttcgttcgaaacgggtatatcttcacatgacatctagacagaagctttctcagaaaattctttgggatgattgagttgaactcacagagctgagcattccttgcgatgtagcagtttagaaacacactttctgcagaatctgcaagtgcatatttggacctctgtgaggaattcgttggaaacgggataatttcagctgactaaacagaagcattctcagaaccttcttcgtgatgtctgcattcaactcacagtgtggaacctttctttgatagttcaggtttgaaacactctttttgtagaaactgcaaggggataattgcactctttgaggagtaccgtagtaaaggaaataacttcctataaaaagaagacagaagcattctcagaaccctcttcgtgatgtttgcattcaactcacagtgctgaacctttctttgatagttcagctttgaaacactctttttgtagaaactgcaagtggatatttggtcctctctgagcatttcgttggaaacgggataaactgcacagaactaaacagaagcattctcagaaccttcttcgtgatgtttgcattcaactcacagtgttgaacctttctttgatagttcaggtttgaaacggtctttctgtagaaactgcaagtagatatttggacctctctgaggatttcgttggaaacgggataacccgcacagaactaaaacagaagcattcacagaaaactcttggtgacgactgagtttaactcacagagctgaacattcctttggatggagcagtttcgaaacacactatttgtagaatgtgcaagtggatatttgggcctctctgaggatttcgttggaaacgggataaaccgcacagaactaaacagaagcattctcagaaactactttgtgatgattgcattcaagtcacagagttgaacattccctttgacagagcagtttggaaactctctttgtgtagaatctgcaagtggagatatggaccgctttgaggcctatggtagtaaaggaaatagcttcatataaaagctagacagtagcattctcagaaacttctttgtgatgcttgcattcaactcacagagttgaactttcctttcgagagagaagctttgaaacactctttttccagaatctgcaagtggacatttggagggctttgaggcctgtggtggaaaaggaattaacttcccgtaaaagctagatagaagcattgtcagaaacttctttgtgatgattgcattcaactcacagagatgaaggttcctttacaaacagcagtttccaaacactctttctgtggaatctgcaagtggatatttagacctctttgaagatttcgttggaaacgggagaatcttcacagaaaagctaaacagaagcattctcagaaacttctctgtgatgtttgtgttcaactcccagagtttcacattgcttttcatagagtagttctgaaacatgcttttcgtagtgtctgcaagtggacatttggagcgctttcaggcctgtggtggaaaacgaattatggtcccataaaaactggagagaagccttctcagaaacttctctgtgatgattgcattcaactcacagatttgaaccctcctatggatagagcattgttgaaactctctttttgtggaatctgcaagtggatatgtggacctctccgaagatgtctttggaaacgggaatatcttcacataaaaactaaacagaagcattctcagaaacttcttggtgatgtttgcattcaaatcccagagttgaaccttcctgtgatagttcaggtttgaatcactctttttgtaggatctgcaagtggatatttggaccactctgtggccttcgttcgaaacgggtacatcttcacataaaatctagacagaagcattctcagaaaatactttgtgatgattgagtttaactcacagagctgaacattcctttggatggagcaggtttgagacacactttttgtagaatctacaagtggatatttggacctctctgaggatttcgttggaaacgcgataactgcacctaactacacggaagccttctcagaaactactttgtgatgattgcattcacctcacggagtggagcattcctattgacagagcagtttggaaacactcttgttgtggaatgtgcaagtggagatttggagcgctttgaggcctatggtagtaaagggaatagcttcatagaaaaattagacagatgcattctcaggaactttttggtgatgtttgtattcaactcccagagttgaactttcctttggaaagagcagctatgaaacactctttttctagaatctgcaagtggacgtttggagggctttgtggtttgtggtggaaaaggaaatatcttcacctaaatactagatagaagcattctcagaagcttctctgtgatgactgcattcaactcacggagttgaacactccttttgagagcgcagttttgaaactctctttctgtggcatctgcaaggggacatgtagacctctttgaagatttcgttggaaacggaatcatcttcacataaaaactatacagaagcagtctcagaatcttctttgtgatgtttgcattcaaatcccagagttgaactttcctttcaaagttcacgtttgaaacactctttttgcaggatctacaagtggatatttggaccactctgtgtccttcgttcgaaacgggtatatcttcacatgacatctagacagaagctttctcagaaaattctttgggatgattgagttgaactcacagagctgaacattccttgcgatggagcagtttagaaacacactttctgcagaatctgcaagtgcatatttggacctctctgaggaattcgttggaaacgggataatttcagctgactaaacagaagcattctcagaaccttcttcgtgatgtctgcattcaactcacagtgtggaacctttctttgatagttcaggtttgaaacactctttttgtagagactgcaaggggataattgcacttctttgaggcctaccgtagtaaaggaaataacttcctataaaaagaagacagaagcattctcagaaccctcttcgtgatgtttgcattcaactcacagtgctgaaactttctttgatagttcagctttgaaacactctttttgtagaaactgcaagtggatacttggtcctctctgaggatttcgttggaaaagggataaaccgcacagaactaaacagaagcattcacagaaaactcttggtgacgactgagtttaactcacagagctgaacattcctttggatggagcattttcgaaacacactatttgtagaatctgcacgtggatatttgagcctctctgaggatttcgatggaaacgggataaaccgcacagaactaaaacagaagcattctcagaaactactttgtgatgattgcattcaagtcacagagttgaacattccctttgacagagcagtttggaaactctctttgtgtagaatctgcaagtggagatatggaatgctttgaggactatggtagtaaaggaaatagcttcatataaaagctagacagtagcattctcagaaacttctttgtgatgcttgcattcaactcacagatgttgaactttcctttcgagagagaagctttgaaacactctttttccagaatctgcaagtggacatttggagggctttgaggcctgtggtggaaaaggaattatcttcccgtaaaagctagatagaagaattgtcagaaatttctttgtgatgattgcattcaactcaaagagttgaaggttccttttcaagcagccgtttgcaaacactctttctgtggaatgtggaagaggatatttggacgtctttgaagatttcgttggaaacatgataatcttcccagaaaagctaaacagaagcattctcagaaacttctctgtgatgtttgtgttcaactcacagtgtttcacgttgcttttcatagagcagttctgaaacattcttttcgcagtgtctacaagtggacatttggagagctttcaggcctgtggtggaaaagaaattatcgtcacataagaactagagagaagccttctcagaaacttctctgtgatgactgcattcaactcacagagttgaaccctcctatggatagagcagtgttgaaactctctttttgtggaatctgcaagtggatatgtggacctctccgaagatgttctttggaaacgggaatatcttcacataaaaactaaacagaagcattctcagaaacttcttggtgatgtttgcattcaaatcccagagttgaaccttcctttgatagttcaggtttgaaacactctttttgtaggatctgcaagtggatatttggaccactctgttgccttcgttcaaaacgggtacatcttcgcataatatctagacagaagcattctcagaaaatactttgtgatgattgagtttaaatcacagagctgaccattcctttggatggagcaggtttgagacacactttttgtagaatctacaagtggatatttggacctctctgaggatttcgttggaaacgggataactgcacctaactaaacggaagcattctcagaaactgctttgtgatgattgcattcacctcacagagttgaacattcctattgatagagcagtttggaaacactcttgttgtggaatgtgcaagtggagatttggagcgctttgaggcctatggtagtaaagggaatagcttcatagaaaaactagacagatgcattctcaggaactttttggtgatgtttgtattcaactcccagagttgaactttcctttggaaagagcagctatgaaacactctttttctagaatctgcaagtggacgtttggagggctttgtggtttgtggtggaaaaggaaatatcttcacctaaatactagatagaagcattctcagaagcttctctgtgatgactgcattcaactcacggagttgaacactccttttgagagcgcagttttgaaactctctttctgtggcatctgcaaggggacatgtagacctctttgaagatttcgttggaaacggaatcatcttcacataaaaactatacagaagcagtctcagaatcttctttgtgatgtttgcattcaaatcccagagttgaactttcctttcaaagttcacgtttgaaacactctttttgcaggatctacaagtggatatttggaccactctgtgtccttcgttcgaaacgggtatatcttcacacgacatctagacagaagctttctcagaaaattctttgggatgattgagtggaactcacagagctgaacattccttgcgatgtagcagtttagaaacacactttctgcagaatctgcaagtgcatatttggacctctctgaggaattcgttggaaacgggataatttcagctgactaaacagaagcattctcagaaccttcttcgtgatgtctgcattcaactcacagtgtggaacctttctttgatagttcaggtttgaaacactctttttgtagaaactgcaaggggataattgcacttctttgaggcctaccgtagtaaaggaaataacttcctatagaaagaagacagaagcattctcagaaccctcttcgtgatgtttgcattcaactcacagtgctgaacctttctttgatagttcagctttgaaacactcttcttgtagaaactgcaagtggatatttggtcctctctgaggatttcgttggaaacgggataaaccgcacagaactaaacagaagaattctcagagccctcttcgtgatgtttgcattcaactcacagtgctgaacctttctttgatagtgcagctttgaaacactctttttgtagaaactgcaagtggatatttggtcctctctgaggatttcgttggaaacgggataaaccgcacagaactaaaacagaagcattcacagaaaactcttggtgacgactgagtttaactcacagagctgaacattcctttggatggagcagtttcgaaacacactatttgtagaatctgcaagtggatatttgggcctctctgaggatttcgttggaaaccggattaaaacgcacagaactaaaacagaagcattctcagaaactactttgtgatgattgcattcaagtcacagagttgaacattccctttgacagagcagtttggaaactctctttgtgtagaatctgcaagtggagatatggaccgctttgaggcctatggtagtaaaggaaatagcttcatataaaagctagacagtagcattctcagaaacttctttgtgatgcttgcattcaactcacagagttgaactttcctttcgagagagaagctttgaaacactctttttccagaatgtgcaagtggacatttggggagctttgaggcctagggtggaaaaggaattatcttcccgtaaaagctagatagaagcattgtcagaaacttctttgtgatgattgcattcaactcacagagttgaaggttccttttcaaacagcagtttccaatcactctttctgtggaatctgcaagtggatatttcgacctctttgaagatttcgttggaaacgggagaatcttcacagaaaagctaaacagaagcattctcagaaacttctctgtgatgtttgtgttcaactcccagagtttcacgttgcttttcatagagtagttctgaaacatgcttttcgtagtgtctgcaagtggacatttggagcactttcaggcctgtggtggaaaacgaattatggtcacataaaaactggagagaagccttctcagaaacttctctgtgatgattgcattcaactcacagagttgaaccctcctatggatagagcagtgttgaaactctctttttgtggaatctgcaagtggatatgtggacctctccgaagatgtctttggaaacgggaatatcttcacataaaaactaaacagaagcattctcagaaacttcttggtgatgtttgcattcaaatcccagagttgaaccttcctttgatagttcaggtttgaaacactctttctgtaggatctgcaagtggctatttggaccactctgtggccttcgttcgaaacgggtatatcttcgcataaaatctagacagaagcattctcagaaaatactttgtgatgattgagtttaaatcacagagctgaccattcctttggatggagcaggtttgagacacactttttgtagaatctacaagtggatatttggacctctctgaggatttcgttggaaacgggataactgcacctaactaaacggaagcattctcagaaactgctttgtgatgattgcattcacctcacagagttgaacattcctattgatagagcagtttggaaacactcttgttgtggaatgtgcaagtggagatttggagcgctttgaggcctgtggtagtaaagggaatagcttcatagaaaaactagacagatgcattctcaggaaccttttggtgatgtttgtattcaactcccagagttgaactttcctttggaaagagcagctatgaaacactctttttctagaatctgcaagtggacgtttggagggctttgtggtttgtggtggaaaaggaaatatcttcacctaaatactagatagaagcattctcagaagcttctctgtgatgactgcattcaactcacggagttgaacactccttttgagagcgcagttttgaaactctctttctgtggcatctgcaaggggacatgtagacctctttgaagatttcgttggaaacggaatcatcttcacataaaaactatacagaagcagtctcagaatcttctttgtgatgtttgcattcaaatcccagagttgaactttcctttcaaagttcacgtttgaaacactctttttgcaggatctacaagtggatatttggaccactctgtgtccttcgttcgaaacgggtatatcttcacacgacatctagacagaagctttctcagaaaattctttgggatgattgagtggaactcacagagctgaacattccttgcgatggagcagtttagaaacacactttctgcagaatctgcaagtgcatatttggacctctctgaggaattcgttggaaacgggataatttcagctgactaaacagaagcattctcagaaccttcttcgtgatgtctgcattcaactcacagtgtggaacctttctttgatagttcaggtttgaaacactctttttgtagaaactgcaaggggataattgcacttctttgaggcctaccgtagtaaaggaaataacttcctatagaaagaagacagaagcattctcagaaccctcttcgtgatgtttgcattcaactcacagtgctgaacctttctttgatagttcagctttgaaacactcttcttgtagaaactgcaagtggatatttggtcctctctgaggatttcgttggaaacgggataaaccgcacagaactaaacagaagaattctcagagccctcttcgtgatgtttgcattcaactcacagtgctgaacctttctttgatagtgcagctttgaaacactctttttgtagaaactgcaagtggatgtttggtcctctctgaggatttcgttggaaacgggataaaccgcacagaactaaaacagaagcattgtcagaaacttctttgtgatgattgcattcaactcacagagttgaaggttccttttcaaacagcagtttccaatcactctttctgtggaatctgcaagtggatatttgggcctctctgaggatttcgttggaaacgggataaaacgcacagaactaaaacagaagcattctcagaaacttctctgtgatgtttgtgttcaactcccagagtttcacgttgcttttcatagagtagttctgaaacatgcttttcgtagtgtctgcaagtggacatttggagcgctttcaggcctgtggtggaaaacgaattatggtcacataaaaactggagagaagccttctcagaaacttctctgtgatgattgcattcaactcacagagttgaaccctcctatggatagagcagtgttgaaactctctttttgtggaatctgcaagtggatatgtggacctctccgaagatgtctttggaaacgggaatatcttcacataaaaactaaacagaagcattctcagaaacttcttggtgatgtttgcattcaaatcccagaagttgaaccttcctttgatagttcaggtttgaaacactctttttgtaggatctgcaagtggatatttggaccactctgtggccttcgttcgaaacggctatatcttcgcataaaatctagacagaagcattctcagaaaatactttgtgatgattgagttaaaatcacagagctgaacattcctttggatggagcaggtttgagacacactttttgtagaatctacaagtggatatttggacctctctgaggatttcgttggaaacgggataactgcacctaactaaacggaagcattctcagaaactgctttgtgatgattgcattcacctcacagagttgaacattcgtattgatagagcagtttggaaacactcttcttgtggaatgtgcaagtggagatttggagcgctttggggcctatggtagtaaagggaatagcttcatagaaaaactagacagatgcattctcaggaactttttggtgatgtttgtattcaactcccagagttgaactttcctttggaaagagcagctatgaaacactctttttctagaatctgcaagtggacgtttggagggctttgtggtttgtggtggaaaaggaaatatcttcacctaaatactagatagaagcattctcagaagcttctctgtgatgactgcattcaactcacggagttgaacactccttttgagagcgcagttttgaaactctctttctgtggcatccgcaaggggacatgtggacctctttgaagatttcgttggaaacggaatcatcttcacataaaaactatacagaagcagtctcagaatcttctttgtgatgtttgcattcaaatcccagagttgaactttcctttcaaagttcacgtttgaaacactctttttgcaggatctacaagtggatatttggaccactctgtgtccttcgttcgaaacgggtatatcttcacatgacatctagacagaagctttctcagaaaattctttgggatgattgagtggaactcacagagctgaacattccttgcgatgtagcagtttagaaacacactttctgcagaatctgcaagtgcatatttggacatctctgaggaattcgttggaaacgggataatttcagctgactaaacagaagcattctcagaaccttcttcgtgatgtctgcattcaactcacagtgtggaacctttctttgatagttcaggtttgaaacactcttttcgtagaaactgcaaggggataattgcagttctttgaggcctaccgtcgtaaaggaaataacttcctatagaaagaagacagaagcattctcagaaccctcttcgtgatgtttgcattcaactcacagtgctgaacctttctttgatagttcagctttgaaacactcttcttgtagaaactgcaagtggatatttggtcctctctgaggatttcgttggaaacgggataaaccgcacagaactaaacagaagaactctcagagccctcttcgtgatgtttgcattcaactcacagtgctgaacctttctttgatagtgcagctttgaaacactctttttgtagaaactgcaagtggatatttggtcctctctgaggatttcgttggaaacgggataaaccgcacagaactaaaacagaagcattcacagaaaactcttggtgacgactgagtttaactcacagagctgaacattcctttggatggagcagtttcgaaacacactatttgtagaatctgcaagtggatatttgggcctctctgaggatttcgttggaaacgggataaaacgcacagaactaaaacagaagcattctcagaaactactttgtgatgattgcattcaagtcacagagttgaacattccctttgacagagcagtttggaaactctctttgtgtagaatctgcaagtggagatatggaccgctttgaggcctatggtagtaaaggaaatagcttcatataaaagctagacagtagcattctcagaaacttctttgtgatgcttgcattcaactcacagagttgaactttcctttcgagagagaagctttgaaacactctttttccagaatgtgcaagtggacatttggggagctttgaggcctggggtggaaaaggaattatcttcccgtaaaagctagatagaagcattgtcagaaacttctttgtgatgattgcattcaactcacagagttgaaggttccttttcaaacagcagtttccaatcactctttctgtggaatctgcaagtggatatttcgacctctttgaagatttcgttggaaacgggagaatcttcacagaaaagctcaacagaagcattctcagaaacttctctgtgatgtttgtgttcaactcccagagtttcacgttgcttttcatagagtagttctgaaacatgcttttcgtagtgtctgcaagtggacatttggagcgctttcaggcctgtggtggaaaacgaattatggtcacataaaaactggagagaagccttctcagaaacttctctgtgatgattgcattcaactcacagagttgaaccctcctatggatagagcagtgttgaaactctctttttgtggaatctgcaagtggatatgtggacctctccgaagatgtctttggaaacgggaatatcttcacataaaaactaaacagaagcattctcagaaacttcttggtgatgtttgcattcaaatcccagagttgaaccttcctttgatagttcaggtttgaaacactctttctgtaggatctgcaagtggctatttggaccactctgtggccttcgttcgaaacgggtatatcttcgcataaaatctagacagaagcattctcagaaaatactttgtgatgattgagtttaaatcacagagctgaccattcctttggatggagcaggtttgagacacactttttgtagaatctacaagtggatatttggacctctctgaggatttcgttggaaacgggataactgcacctaactaaacggaagcattctcagaaactgctttgtgatgattgcattcacctcacagagttgaacattcctattgatagagcagtttggaaacactcttgttgcggaatgtgcaagtggagatttggagcgctttgaggcctgtggtagtaaagggaatagcttcatagaaaaactagacagatgcattctcaggaactttttggtgatgtttgtattcaactcccagagttgaactttcctttggaaagagcagctatgaaacactctttttctagaatctgcaagtggacgtttggagggctttgtggtttgtggtggaaaaggaaatatcttcacctaaatactagatagaagcattctcagaagcttctctgtgatgactgcattcaactcacggagttgaacactccttttgagagcgcagttttgaaactctctttctgtggcatctgcaaggggacatgtagacctctttgaagatttcgttggaaacggaatcatcttcacataaaaactatacagaagcagtctcagaatcttctttgtgatgtttgcattcaaatcccagagttgaactttcctttcaaagttcacgtttgaaacactctttttgcagaatctacaagtggatatttggaccactctgtgtccttcgttcgaaacgggtatatcttcacatgacatctagacagaagctttctcagaaaattctttaggatgattgagtggaactcacagagctgaacattccttgcgatgtagcagtttagaaacacactttctgcagaatctgcaagtgcatatttggacctctctgaggaattcgttggaaacgggataatttcagctgactaaacagaagcattctcagaaccttcttcgtgatgtctgcattcaactcacagtgtggaacctttctttgatagttcaggtttgaaacactctttttgtagaaactgcaaggggataattgcacttctttgaggcctaccgtagtaaaggaaataacttcctatagaaagaagacagaagcattctcagaaccctcttcgtgatgtttgcattcaactcacagtgctgaacctttctttgatagttcagctttgaaacactcttcttgtagaaactgcaagtggatatttggtcctctctgaggatttcgttggaaacgggataaaccgcacagaactaaacagaagaattctcagtagccctcttcgtgatgtttgcattcaactcacagtgctgaacctttctttgatagtgcagctttgaaacactctttttgtagaaactgcaagtggatgtttggtcctctctgaggatttcgttggaaacgggataaaccgcacagaactaaaacagaagcattcacagaaaacacttggtgacgactgagtttaactcacagagctgaacattcctttggatggagcagtttcgaaacacactatttgtagaatgtgcaagtggatatgtgggcctctctgaggatttcgttggaaatgggataaaccgcacagaactaaacagaagcattctcagaaactactttgtgatgattgcattcaagtcacagagttgaacattccctttgacagagcagtttggaaactctctttgtgtagaatctgcaagtggagatatggaccgctttgaggcctatggtagtaaaggaaatagcttcatataaaagctagacagtagcattctcagaaacttcgttgtgatgcttgcattcaactcacagagttgaactttcctttcgagagagaagccttgaaacactctttttccagaatctgcaagtggacatttggagggctttgaggcctgtggtggaaaaggaattatcttcccgtaaaagctagatagaagcattgtcagaaacttctttgtgatgattgcattcaactcacagagttgaaggttccttttcaaagagcagtttccaatcactctttctgtggaatctgcaagtggatatttggacctctttgaagatttcgttggaaacgggagaatcttcacagaaaagctaaacagaagcattctcagaaacttctcagtgatgtttgtgttcaactcccagagtttcacattgcttttcatagagtagttctgaaacatgcttttcgtagtgtctgcaagtggacatttggagcgctttcaggcctgtggtggaaaacgaattatggtcacataaaaactggagagaagccttctcagaaacttctctgtgatgattgcattcaactcacagagttgaaccctcctatggatagagcagtgttgaaactctctttttgtggaatctgcaagtggatatgtggacctctccgaagatgtctttggaaacgggaatatcttcacataaaaactaaacagaagcattctcagaaacttcttggtgatgtttgcattcaaatcccagagttgaaccttcctttgatagttcaggtttgaaacactctttttgtaggatctgcaagtggatatttggaccactctgtggccttcgttcgaaacgggtatatcttcgcataaaatctagacagaagcattctcagaaaatactttgtgatgattgagtttaactcacagagctgaacattcctttggatggagcaggtttgagacacaccttttgtagaatctacaagtggatatttggacctctctgaggatttcgttggaaacgggataactgcacctaactaaacggaagcattctcagaaactgctttgtgatgattgcattcacctcacagagttgaacattcctattgatagagcagtttggaaacactcttgttgtggaatgtgcaagtggagatttggagcgctttgaggcctatggtagtaaagggaatagcttcatagaaaaactagacagatgcattctcaggaactttttggtgatgtttgtattcaactcccagagttgaactttcctttggaaagagcagctatgaaacactctttttctagaatctgcaagtggacgtttggagggctttgtggtttgtggtggaaaaggaaatatcttcacctaaatactagatagaagcattctcagaagcttctctgtgatgactgcattcaactcacggagttgaacactccttttgagagcgcagttttgaaactctctttctgtggcatctgcaaggggacatgtagacctctttgaagatttcgttggaaacggaatcatcttcacataaaaactatacagaagcagtctcagaaatcttctttgtgatgtttgcattcaaatcccagagttgaactttcctttcaaagttcacgtttgaaacactctttttgcaggatctacaagtggatatttggaccactctgtgtccttcgttcgaaacgggtatatcttcacacgacatctagacagaagctttctcagaaaattctttgggatgattgagtggaactcacagagctgaacattccttgcgatgtagcagtttagaaacacactttctgcagaatctgcaagtgcatatttggacctctctgaggaattcgttggaaacgggataatttcagctgactaaacagaagcattctcagaaccttcttcgtgatgtctgcattcaactcacagtgtggaacctttctttgatagttcaggtttgaaacactctttttgtagaaactgcaaggggataattgcacttctttgaggcctaccgtagtaaaggaaataacttcctatagaaagaagacagaagcattctcagaaccctcttcgtgatgtttgcattcaactcacagtgctgaacctttctttgatagttcagctttgaaacactcttcttgtagaaactgcaagtggatatttggtcctctctgaggatttcgttggaaacgggataaaccgcacagaactaaacagaagcattctcagaaccttcttcgtgatgtttgcattcaactcacagtgttgaacctttctttgatagttcaggtttgaaacggtctttctgtagaaactgcaagtagatatttggacctctctgaggatttcgttggaaacgggataaaccgcacagaactaaaacagaagcattcacagaaaactcttggtgacgactgagtttaactcacagagctgaacattcctttggatggagcagtttcgaaacacactatttgtagaatgtgcaagtggatatttgggcctctctgaggatttcgttggaaacgggataaaccgcacagaactaaacagaagcattctcagaaactactttgtgatgattgcattcaagtcacagagttgaacattccctttgacagagcagtttggaaactctctttctgtagaatctgcaagtggagatatggaccgctttgaggcctatggtagtaaaggaaatagcttcatataaaagctagacagtagcattctcagaaacttctttgtgatgcttgcattcaactcacagagttgaactttcctttcaagagagaagctttgaaacactctttttccagaatctgcaagtggacatttggagggctttgaggcctgtggtagaaaaggaattaacttcccgtaaaagctagatagaagcattgtcagaaacttctttgtgatgattgcattcaactcacagagttgaaggttccttttcaaacagcagtttccaatcactctttctgtggaatctgcaagtggatatttgggcctctctgaggatttcgttggaaacgggataaaacgcacagaactaaaacagaagcattctcagaaacttctctgtgatgtttgtgttcaactcccagagtttcacgttgcttttcatagagtagttctgaaacatgcttttcgtagtgtctgcaagtggacatttggagcgctttcaggcctgtggtggaaaacgaattatggtcacataaaaactggagagaagccttctcagaaacttctctgtgatgattgcattcaactcacagagttgaaccctcctatggatagagcagtgttgaaactctctttttgtggaatctgcaagtggatatgtggacctctccgaagatgtctttggaaacgggaatatcttcacataaaaactaaacagaagcattctcagaaacttcttggtgatgtttgcattcaaatcccagagttgaaccttcctttgatagttcaggtttgaaacactctttctgtaggatctgcaagtggctatttggaccactctgtggccttcgttcgaaacgggtatatcttcgcataaaatctagacagaagcattctcagaaaatactttgtgatgattgagtttaaatcacagagctgaccattcctttggatggagcaggtttgagacacactttttgtagaatctacaagtggatatttggacctctctgaggatttcgttggaaacgggataactgcacctaactaaacggaagcattctcagaaactgctttgtgatgattgcattcacctcacagagttgaacattcctattgatagagcagtttggaaacactcttgttgtggaatgtgcaagtggagatttggagcgctttgaggcctatggtagtaaagggaatagcttcatagaaaaactagacagatgcattctcaggaaccttttggtgatgtttgtattcaactcccagagttgaactttcctttggaaagagcagctatgaaacactctttttctagaatctgcaagtggacgtttggagggctttgtggtttgtggtggaaaaggaaatatcttcacctaaatactagatagaagcattctcagaagcttctctgtgatgactgcattcaactcacggagttgaacactccttttgagagcgcagttttgaaactctctttctgtggcatctgcaaggggacatgtagacctctttgaagatttcgttggaaacggaatcatcttcacataaaaactatacagaagcagtctcagaatcttctttgtgatgtttgcattcaaatcccagagttgaactttcctttcaaagttcacgtttgaaacactctttttgcaggatctacaagtggatatttggaccactctgtgtccttcgttcgaaacgggtatatcttcacacgacatctagacagaagctttctcagaaaattctttgggatgattgagtggaactcacagagctgaacattccttgcgatgtagcagtttagaaacacactttctgcagaatctgcaagtgcatatttggacctctctgaggaattcgttggaaacgggataatttcagctgactaaacagaagcattctcagaaccttcttcgtgatgtctgcattcaactcacagtgtggaacctttctttgatagttcaggtttgaaacactctttttgtagaaactgcaaggggataattgcacttctttgaggcctaccgtagtaaaggaaataacttcctatagaaagaagacagaagcattctcagaaccctcttcgtgatgtttgcattcaactcacagtgctgaacctttctttgatagttcagctttgaaacactcttcttgtagaaactgcaagtggatatttggtcctctctgaggatttcgttggaaacgggataaaccgcacagaactaaacagaagcattctcagagccctcttcgtgatgtttgcattcaactcacagtgctgaacctttctttgatagtgcagctttgaaacactctttttgtagaaactgcaagtggatgtttggtcctctctgaggatttcgttggaaacgggataaaccgcacagaactaaaacagaagcattgtcagaaacttctttgtgatgattgcattcaactcacagagttgaaggttccttttcaaacagcagtttccaatcactctttctgtggaatctgcaagtggatatttgggcctctctgaggatttcgttggaaacgggataaaacgcacagaactaaaacagaagcattctcagaaacttctctgtgatgtttgtgttcaactcccagagtttcacgttgcttttcatagagtagttctgaaacatgcttttcgtagtgtctgcaagtggacatttggagcgctttcaggcctgtggtggaaaacgaattatggtcacataaaaactggagagaagccttctcagaaacttctctgtgatgattgcattcaactcacagagttgaaccctcctatggatagagcagtgttgaaactctctttttgtggaatctgcaagtggatatgtggacctctccgaagatgtctttggaaacgggaatatcttcacataaaaactaaacagaagcattctcagaaacttcttggtgatgtttgcattcaaatcccagagttgaaccttcctttgatagttcaggtttgaaacactctttctgtaggatctgcaagtggctatttggaccactctgtggccttcgttcgaaacgggtatatcttcgcataaaatctagacagaagcattctcagaaaatactttgtgatgattgagtttaaatcacagagctgaccattcctttggatggagcaggtttgagacacactttttgtagaatctacaagtggatatttggacctctctgaggatttcgttggaaacgggataactgcacctaactaaacggaagcattctcagaaactgctttgtgatgattgcattcacctcacagagttgaacattcctattgatagagcagtttggaaacactcttgttgtggaatgtgcaagtggagatttggagcgctttgaggcctatggtagtaaagggaatagcttcatagaaaaactagacagatgcattctcaggaactttttggtgatgtttgtattcaactcccagagttgaactttcctttggaaagagcagctatgaaacactctttttctagaatctgcaagtggacgtttggagggctttgtggtttgtggtggaaaaggaaatatcttcacctaaatactagatagaagcattctcagaagcttctctgtgatgactgcattcaactcacggagttgaacactccttttgagagcgcagttttgaaactctctttctgtggcatctgcaaggggacatgtagacctctttgaagatttcgttggaaacggaatcatcttcacataaaaactatacagaagcagtctcagaatcttctttgtgatgtttgcattcaaatcccagagttgaactttcctttcaaagttcacgtttgaaacactctttttgcaggatctacaagtggatatttggaccactctgtgtccttcgttcgaaacgggtatatcttcacaggacatctagacagaagctttctcagaaaattctttgggatgattgagttgaactcacagagctgaacattccttgcgatgtagcagtttagaaacacactttctgcagaatctgcaagtgcatatttggacctctctgaggaattcgttggaaacgggataatttcagctgactaaacagaagcattctcagaaccttcttcgtgatgtctgcattcaactcacagtgtggaacctttctttgatagttcaggtttgaaacactctttttgtagaaactgcaaggggataattgcacttctttgaggcctaccgtcgtaaaggaaataacttcctatagaaagaagacagaagcattctcagaaccctcttcgtgatgtttgcattcaactcacagtgctgaacctttctttgatagttcagctttgaaacactcttcttgtagaaactgcaagtggatatatggtcctttctgaggatttcgttggaaacgggataaaccgcacagaactaaacagaagcattctctgaaccttcttcgtgatgtttgcattcaactcacagtgttgaacctttctttgatagttcaggttggaaacggtctttctgtagaaactgcaagaagatatttggacctctctgaggatttcgttggaaacgggataaaccgcacagaactaaaacagaagcattcacagaaaactcttggtgacgactgagtttaactcacagagctgaacattcctttggatggagcagtttcgaaacacactatttgtagaatgtgcaagtggatatttgggcctctctgaggatttcgctggaaacgggataaaccgcacagaactaaacagaagcattctcagaaactactttgtgatgattgcattcaagtcacagagttgaacattccctttgacagagcagtttggaaactctctttgtgtagaatctgcaagtggagatatggaccgctttgaggcctatggtagtaaaggaaatagcttcatataaaagctagacagtagcattctcagaaacttccttgtgatgcttgcattcaactcacagagttgaactttcctttcgagagagaagctttgaaacactctttttccagaatctgcaagtggacatttggagggctttgaggcctgtggtggaaaaggaattatcttcccgtaaaagctagatagaagcattgtcagaaacttctttgtgatgattgcattcaactcacagagttgaaggttccttttcaaagagcagtttccaatcactctttctgtggaatatgcaagtggatatttggacctattttgaagatttcgttggaaacgggagaatcttcacagaaaagctaaacagaagcattctcagaaacttctctgtgatgtttgtgttcaactcccagagtttcacattgcttttcatagagtagttctgaaacatgcttttcgtagtgtctacaagtggacatttggagcgctttcaggcctgtggtggaaaacgaattatggtcacataaaaactggagagaagccttctcagaaacttctctgtgatgattgcattcaactcacagagttgaaccctcctatggatagagcagtgttgaaactctctttttgtggaatctgcaagtggatatgtggacctctccgaagatgtctttggaaacgggaatatcttcacataaaaactaaacagaagcattctcagaaacttcttggtgatgtttgcattcaaatcccagagttgaaccttcctttgatagttcaggtttgaaacactatttttgtaggatctgcaagtggatatttggaccactctgtggccttcgttcgaaacgggtatatcttcgcataaaatctagacagaagcattctcagaaaatactttgtgatgattgagtttaactcacagagctgaacattcctttggatggagcaggtttgagacacactttttgtagaatctacaagtggatatttggacctctctgaggatttcgttggaaacgcgataactgcacctaactaaacggaagcattctcagaaactgctttgtgatgattgcattcacctcacagagttgaacattcctattgatagagcagtttggaaacactcttgttgtggaatgtgcaagtggagatttggagcgctttgaggcctatggtagtaaagggaatagcttcatagaaaaactagacagatgcattctcaggaactttttggtgatgtttgtattcaactcccagagttgaactttcctttggaaagagcagctatgaaacactctttttctagaatctgcaagtggacgtttggagggctttgtggtttgtggtggaaaaggaaatatcttcacctaaatactagatagaagcattctcagaagcttctctgtgatgactgcattcaactcacggagttgaacactccttttgagagcgcagttttgaaactctctttctgtggcatctgcaaggggacatgtagacctctttgaagatttcgttggaaacggaatcatcttcacataaaaactatacagaagcagtctcagaatcttctttgtgatgtttgcattcaaatcccagagttgaactttcctttcaaagttcacgtttgaaacactctttttgcaggatctacaagtggatatttggaccactctgtgtccttcgttcgaaacgggtatatcttcacacgacatctagacagaagctttctcagaaaattctttgggatgattgagtggaactcacagagctgaacattccttgcgatggagcagtttagaaacacactttctgcagaatctgcaagtgcatatttggacctctctgaggaattcgttggaaacgggataatttcagctgactaaacagaagcattctcagaaccttcttcgtgatgtctgcattcaactcacagtgtggaacctttctttgatagttcaggtttgaaacactctttttgtagaaactgcaaggggataattgcacttctttgaggcctaccgtagtaaaggaaataacttcctatagaaagaagacagaagcattctcagaaccctcttcgtgatgtttgcattcaactcacagtgctgaacctttctttgatagttcagctttgaaacactcttcttgtagaaactgcaagtggatatttggtcctctctgaggatttcgttggaaacgggataaaccgcacagaactaaacagaagaattctcagagccctcttcgtgatgtttgcattcaactcacagtgctgaacctttctttgatagtgcagctttgaaacactctttttgtagaaactgcaagtggatgtttggtcctctctgaggatttcgttggaaacgggataaaccgcacagaactaaaacagaagcattgtcagaaacttctttgtgatgattgcattcaactcacagagttgaaggttccttttcaaacagcagtttccaatcactctttctgtggaatctgcaagtggatatttgggcctctctgaggatttcgttggaaacgggataaaacgcacagacctaaaacagaagcattctcagaaacttctctgtgatgtttgtgttcaactcccagagtttcacgttgcttttcatagagtagttctgaaacatgcttttcgtagtgtctgcaagtggacatttggagcgctttcaggcctgtggtggaaaacgaattatggtcacataaaaactggagagaagccttctcagaaacttctctgtgatgattgcattcaactcacagagttgaaccctcctatggatagagcagtgttgaaactctctttttgtggaacctgcaagtggatatgtggacctctccgaagatgtctttggaaacgggaatatcttcacataaaaactaaacagaagcattctcagaaacttcttggtgatgtttgcattcaaatcccagagttgaaccttcctttgatagttcaggtttgaaacactctttctgtaggatctgcaagtggctatttggaccactctgtggccttcgttcgaaacgggtatatcttcgcataaaatctagacagaagcattctcagaaaatactttgtgatgattgagtttaaatcacagagctgaccattcctttggatggagcaggtttgagacacactttttgtagaatctacaagtggatatttggacctctctgaggatttcgttggaaacgggataactgcacctaactaaacggaagcattctcagaaactgctttgtgatgattgcattcacctcacagagttgaacattcctattgatagagcagtttggaaacactcttgttgtggaatgtgcaagtggagatttggagcgctttgaggcctgtggaagtaaagggaatagcttcatagaaaaactagacagatgcattctctggaactttttggtgatgtttgtattcaactcccagagttgaacattcctttggaaagagcagctatgaaaccctctttttctagaatctgcaagtggacgtttggagggctttgtggtttgtggtggaaaaggaaatatcttcacctaaatactagatagaaacattctcagaagcttctctgtgatgactgcattcaactcacggagttgaacactccttttgagagcgcagttttgaaactctctttcagtggcatctgcaaggggacatgtagacctctttgaagatttcgttggaaacggaatcatcttcacatcaaaactatacagaagcagtctcagaatcttctttgtgatgtttgcattcaaatcccagagttgaactttcctttcaaagttcacgtttgaaacactctttttgcaggatctacaagtggatatttggaccactctgtgtccttcgttcgaaacgggtatatcttcacatgacatctagacagaacctttctcagaaaattctttgtgatgattgagttgaactcacagagctgaacattccttgcgatggagcagtttagaaacacactttctgcagaatctgcaagtgcatatttggacctctctgaggaattcgttggaaacgggataatttcagctgactaaacagaagcattctcagaaccttcttcgtgatgtctgcattcaactcacagtgtggaacctttctttgatagttcaggtttgaaacactctttttgtagaaactgcaaggggataattgcacttctttgaggcctaccgtagtaaaggaaataacttcctatagaaagaagacagaagcattctcagaaccctcttcgtgatgtttgcattcaactcacagtgctgaacctttctttgatagttcagctttgaaacactcttcttgtagaaactgcaagtggatatttggtcctctctgaggatttcgttggaaacgggataaaccgcacagaactaaacagaagaattctcagagccctcttcgtgatgtttgcattcaactcacagtgctgaacctttctttgatagtgcagctttgaaacactctttttgtagaaactgcaagtggatgtttggtcctctctgaggatttcgttggaaacgggataaaccgcacagaactaaaacagaagcattgtcagaaacttctttgtgatgattgcattcaactcacagagttgaaggttccttttcaaacagcagtttccaatcactctttctgtggaatctgcaagtggatatttgggcctctctgaggatttcgttggaaacgggataaaacgcacagaactaaaacagaagcattctcagaaaacttctctgtgatgtttgtgttcaactcccagagtttcacgttgcttttcatagagtagttctgaaacatgcttttcgtagtgtctgcaagtggacatttggagcgctttcaggcctgtggtggaaaacgaattatggtcacataaaaactggagagaagccttctcagaaacttctctgtgatgattgcattcaactcacagagttgaaccctcctatggatagagcagtgttgaaactctctttttgtggaatctgcaagtggatatgtggacctctccgaagatgtctttggaaacgggaatatcttcacataaaaactaaacagaagcattctcagaaacttcttggtgatgtttgcattcaaatcccagagttgaaccttcctttgatagttcaggtttgaaacactctttctgtaggatctgcaagtggctatttggaccactctgtggccttcgttcgaaacgggtatatcttcgcataaaatctagacagaaagcattctcagaaaatactttgtgatgattgagtttaaatcacagagctgaccattcctttggatggagcaggtttgagacacactttttgtagaatctacaagtggatatttggacctctctgaggatttcgttggaaacgggataactgcacctaactaaacggaagcattctcagaaactgctttgtgatgattgcattcacctcacagagttgaacattcctattgattgagcagtttggaaacactcttgttgtggaatgtgcaagtggagatttggagcgctttgaggcctatggtagtaaagggaatagcttcatagaaaaactagacagatgcattctcaggaactttttggtgatgtttgtattcaactcccagagttgaactttcctttggaaagagcagctatgaaacactctttttctagaatctgcaagtggacgtttggagggctttgtggtttgtggtggaaaaggaaatatcttcacctaaatactagatagaagcattctcagaagcttctctgtgatgactgcattcaactcacggagttgaacactccttttgagagcgcagttttgaaactctctttctgtggcatctgcaaggggacatgtagacctctttgaagatttcgttggaaacggaatcatcttcacataaaaactatacagaagcagtctcagaatcttctttgtgatgtttgcattcaaatcccagagttgaactttcctttcaaagttcacgtttgaaacactctttttgcaggatctacaagtggatatttggaccactctgtgtccttcgttcgaaacgggtatatcttcacacgacatctagacagaagctttctcagaaaattctttgggatgattgagtggaactcacagagctgaacattccttgcgatgtagcagtttagaaacacactttctgcagaatctgcaagtgcatatttggacctctctgaggaattcgttggaaacgggataatttcagctgactaaacagaagcattctcagaaccttcttcgtgatgtctgcattcaactcacagtgtggaacctttctttgatagttcaggtttgaaacactctttttgtagaaactgcaaggggataattgcacttctttgaggcctaccgtagtaaaggaaataacttcctatagaaagaagacagaagcattctcagaaccttcttcgtgatgtttgcattcaactcacagtgttgaaccgttccttgatagttcaggtttgaaacggtctttctgtagaaaatgcaagtagatatttggacctctctgaggatttcgttggaaacgggataaaccgcacagaactaaaacggaagcattctcagagccctcttcgtgatgtttgcattcaactcacagtgctgaacctttctttgatagtgcagctttgaaacactctttttgtagaaactgcaagtggatatttggtcctctctgaggatttcgttggaaacgggataaaccgcacagaactaaaacagaagcattgtcagaaacttctttgtgatgattgcattcaactcacagagttgaaggttccttttcaaacagcagtttccaatcactctttctgtggaatctgcaagtggatatttgggcctctctgaggatttcgttggaaacgggataaaacgcacagaactaaaacagaagcattctcagaaacttctctgtgatgtttgtgttcaactcccagagtttcacgttgcttttcatagagtagttctgaaacatgcttttcgtagtgtctgcaagtggacatttggagcgctttcaggcctgtggtggaaaacgaattatggtcacataaaaactggagagaagccttctcagaaacttctctgtgatgattgcattcaactcacagagttgaaccctcctatggatagagcagtgttgaaactctctttttgtggaatctgcaagtggatatgtggacctctccgaagatgtctttggaaacgggaatatcttcacataaaaactaaacagaagcattctcagaaacttcttggtgatgtttgcattcaaatcccagagttgaaccttcctttgatagttcaggtttgaaacactctttctgtaggatctgcaagtggctatttggaccactctgtggccttcgttcgaaacgggtatatcttcgcataaaatctagacagaagcattctcagaaaatactttgtgatgattgagtttaaatcacagagctgaccattcctttggatggagcaggtttgagacacactttttgtagaatctacaagtggatatttggacctctctgaggatttcgttggaaacgggataactgcacctaactaaacggaagcattctcagaaactgctttgtgatgattgcattcacctcacagagttgaacattcctattgatagagcagtttggaaacactcttgttgtggaatgtgcaagtggagatttggagcgctttgaggcctatggtagtaaagggaatagcttcatagaaaaactagacagatgcattctcaggaactttttggtgatgtttgtattcaactcccagagttgaactttcctttggaaagagcagctatgaaacactctttgtctagaatctgcaagtggacgtttggagggctttgtggtttgtggtggaaaaggaaatatcttcacctaaatactagatagaagcattctcagaagcttctctgtgatgactgcattcaactcacggagttgaacactccttttgagagcgcagttttgaaactctctttctgtggcatctgcaaggggacatgtagacctctttgaagatttcgttggaaacggaatcatcttcacataaaaactatacagaagcagtctcagaatcttctttgtgatgtttgcattcaaatcccagagttgaactttcctttcaaagttcacgtttgaaacactctttttgcaggatctacaagtggatatttggaccactctgtgtccttcgttcgaaacgggtatatcttcacacgacatctagacagaagctttctcagaaaattctttgggatgattgagtggaactcacagagctgaacattccttgcgatgtagcagtttagaaacacactttctgcagaatctgcaagtgcatatttggacctctctgaggaattcgttggaaacgggataatttcagctgactaaacagaagcattctcagaaccttcttcgtgatgtctgcattcaactcacagtgtggaacctttctttgatagttcaggtttgaaacactctttttgtagaaactgcaaggggataattgcacttctttgaggcctaccgtagtaaaggaaataacttcttatagaaagaagacagaagcattctcagaaccctcttcgtgatgtttgcattcaactcacagtgctgaacctttctttgatagttcagctttgaaacactcttcttgtagaaactgcaagtggatatttggtcctctctgaggatttcgttggaaacgggataaaccgcacagaactaaacagaagaattctcagagccctcttcgtgatgtttgcattcaactcacagtgctgaacctttctttgatagtgcagctttgaaacactctttttgtagaaactgcaagtggatgtttggtcctctctgaggatttcgttggaaacgggataaaccgcacagaactaaaacagaagcattcacagaaaactcttggtgacgactgagtttaactcacagagctgaacattcctttggatggagcagtttcgaaacacactatttgtagaatctgcaagtggatatttgggcctctctgaggatttcgttggaaacgggataaaacgcacagaactaaaacagaagcattctcagaaactactttgtgatgattgcattcaagtcacagagttgaacattccctttgacagagcagtttggaaactctctttgtgtagaatctgcaagtggagatatggaccgctttgaggcctatggtagtaaaggaaatagcttcatataaaacctagacagtagcattctcagaaacttctttgtgatgcttgcattcaactcacagagttgaactttcctttcgagagagaagctttgaaacactctttttccagaatgtgcaagtggacatttggggagctttgaggcctgtggaggaaaaggaattatcttcccgtaaaagctagatagaagcattgtcagaaacttctttgtgatgattgcattcaactcacagagttgaaggttccttttcaaacagcagtttccaatcactctttctgtggaatctgcaagtggatatttcgacctctttgaagatttcgttggaaacgggagaatcttcacagaaaagctaaacggaagcattctcagaaacttctctgtgatgtttgtgttcaactcccagagtttcacgttgcttttcatagagtagttctgaaacatgcttttcgtagtgtctgcaagtggacatttggagcgctttcaggcctgtggtggaaaacgaattatggtcacataaaaactggagagaagccttctcagaaacttctctgtgatgattgcattcaactcacagagttgaaccctcctatggatagagcagtgttgaaactctctttttgtggaatctgcaagtggatatgtggacctctccgaagatgtctttggaaacgggaatatcttcacataaaaactaaacagaagcattctcagaaacttcttggtgatgtttgcattcaaatcccagagttgaaccttcctttgatagttcaggtttgaaacactctttctgtaggatctgcaagtggctatttggaccactctgtggccttcgttcgaaacgggtatatcttcgcataaaatctagacagaaagcattctcagaaaatactttgtgatgattgagtttaaatcacagagctgaccattcctttggatggagcaggtttgagacacactttttgtagaatctacaagtggatatttggacctctctgaggatttcgttggaaacgggataactgcacctaactaaacggagcattctcagaaactgctttgtgatgattgcattcacctcacagagttgaacatttctattgatagagcagtttggaaacactcttgttgtggaatgtgcaagtggagatttggagcgcttcgaggcctatggtagtaaagggaatagcttcatagaaaaactagacagatgcattctcaggaactttttggtgatgtttgtattcaactcccagagttgaactttcctttggaaagagcagctatgagacactgtttctctagaatctgcaagtggacgtttggagggctttgtggtttgtggtggaaaaggaaatatcttcacctaaatactagatagaagcattctcagaagcttctctgtgatgactgcattcaactcagggagttgaacactccttttgagagcgcagttttgaaactctctttctgtggcatctgcaaggggacatgtagacctctttgaagatttcgttggaaacggaatcatcttcacataaaaactatacagaagcagtctcagaatcttctttgtgatgtttgcattcaaatcccagagttgaactttcctttcaaagttcacgtttgaaacactctttttgcaggatctacaagtggatatttggaccactctgtgtccttcgttcgaaacgggtatatcttcacatgacatactagacagaagctttctcagaaaattgtttgggatgattgacttgaactcacagagctgagcattccttgcgatgtagcagtttagaaacacactttctgcagaatctgcaagtgcatatttggacctctctgaggaattcgttggaaacgggataatttcagctgactaaacagaagcattctcagaaccttcttcgtgatgtctgcattcaactcacagtgtggaacctttccttgatagttcaggtttgaaacactctttttgtagaaactgcaaggggataattgcactctttgaggagtaccgtagtaaaggaaataacttcctctaaaaagaagacagaagcattctcagaaccctcttcgtgatgtttgcattcaactcacagtgctgaacctttctttgatagttcagctttgaaacactctttttgtagaaactgcaaatggatatttggtcctctctgaggatttctttggaaaagggataaaacgcacagaactaaacagaagcattcaaagaaaactcttggtgacgactgagtttaactcacagaactgaacattcctttggatggagcagtttcgaaacacactatttgtagaatgtgcaagtggatatgtgggcctctctgaggatttcgatggaaacgggataaaccgcacagaactaaacagaagcattctcagaaactactttgtgatgattacattcaagtcacagagtagaacattccctttgacagagcagtttggaaactctctttgcgtagaatctgcaagtggagatatggaccgctttgaggcctatggtagtaaaggaaatagcttcatataaaagctagacagcagcattctcagaaacttctttgtgatgcttgcattcaactcacagagttgaactttcctttcgagagagaagctttgaaacactctttttccagaatgtgcaagtggacatttggagggctttgaggcctgtggtggaaaaggaattatcttcccgtaaaagctagatagaagcattgtcagaaacttctttgtgatgattgcattcaactcacagagttgaaggttccttttcaaagagcagtttccaatcactctttctgtggaatctgcaagtggatatttggacctattttgaagatttcgttggaaacgggataatcttcacagaaaagctaaacagaagcattctcagaaacttctctgtgatgtttgtgttcaactcccagagtttcacattgcttttcatagagtagttctgaaacatgcttttcgtagtgtctgcaagtggacatttggagcgctttcaggcctgtggtggaaaacgaattatggtcacataaaaactggagagaagccttctcagaaacttctctgtgatgattgcattcaactcacagagttgaaccctcctatggatagagcagtgttgaaactctctttttgtggaatctgcaagtggatatgtggacctctccgaagatgtctttggaaacgggaatatcttcacataaaaactaaacagaagcattctcagaaacttcttggtgatgtttgcattcaaatcccagagttgaaccttcctttgatagttcaggtttgaaacactctttttgtaggatctgcaagtggctatttggaccactctgtggccttcgttcgaaacgggtatatcttcgcataaaatctagacagaagcattctcagaaaatactttgtgatgattgagttgaactcacagagctgaacattccattggatggagcaggtttgagacacactttttgtagaatctacaagtggatatttggacctctctgaggatttcgttggaaacgggataactgcacctaactaaacggaagcattctcagaaactgctttgtgatgattgcattcacctcacagagttgaacattcctattgatagaagcagtttggaaacactcttgttgtggaatgtgcaagtggagatttggagcgctttgaggcctatggtagtaaagggaatagcttcatagaaaaactagatagatgcattctcaggaactttttggtgatgtttgtattcaactcccagagttgaactttcctttggaaagagcagctatgaaacactctttttctagaatctgcaagtggacgtttggagggctttgtggtttgtggtggaaaaggaaatatcttcacctaaatactagatagaagcattctcagaagcttctctgtgatgactgcattcaactcacggagttgaacactccttttgagagcgtagttttgaaactctctttctgtggcatctgcaaggggacatgtagacctctttgaagatttcgttggaaacggaatcatcttcacataaaaactatacagaagcagtctcagaatcttctttgtgatgtttgcattcaaatccccgagttgaactttcctttcaaagttcacgtttgaaacactctttttgcaggatctacaagtggatatttggaccactctgtgtccttcgttcgaaacggttatatcttcacatgacatctagacagaagctttctcagaaaattctttgggatgattgagttgaactcacagagctgagcattccttgcgatgtagcagtttagaaacacactttctgcagaatctgcaagtgcatatttggacctctgtgaggaattcgttggaaacgggataatttcagctgactaaacagaagcattctcagaaccttcttcgtgatgtctgcattcaactcacagtgtggaacctttctttgatagttcaggtttgaaacactctttttgtagaaactgcaaggggataattgcactctttgaggagtaccgtagtaaaggaaataacttcctataaaaagaagacagaagcattctcagaaccctcttcgtgatgtttgcattcaactcacagtgctgaacctttctttgatagttcagctttgaaacactctttttgtagaaactgcaagtggatatttggtcctctctgaggatttcgttggaaacgggataaactgcacagaactaaacagaagcattctcagaaccttcttcgtgatgtttgcattcaactcacagtgttgaacctttctttgatagttcaggtttgaaacggtctttctgtagaaactgcaagtagatatttggacctctctgaggatttcgttggaaacgggataacccgcacagaactaaaacagaagcattcacagaaaactcttggtgacgactgagtttaactcacagagctgaacattcctttggatggagcagtttcgaaacacactatttgtagaatgtgcaagtggatatttaggcctctctgaggatttcgttggaaacgggataaaccgcacagaactaaacagaagcattctcagaaactactttgtgatgattgcattcaagtcacagagttgaacattccctttgacagagcagtttggaaactctctttgtgtagaatctgcaagtggagatatggaccgctttgaggcctatggtagtaaaggaaatagcttcatataaaagctagacagtagcattctcagaaacttctttgtgatgcttgcattcaactcacagagttgaactttcctttcgagagagaagctttgaaacactctttttccagaatctgcaagtggacatttggagggctttgtggcctgtggtggaaaaggaattatcttcccgaaaaagctagatagaagcattgtcagaaacttctttgtgatgattgcattcaactcacagagttgaaggttccctttcaaacagcagtttccaatcactctttctgtggaatctgtaagtggatatttggacctctttgaagatttcgttggaaacgggagaatcttcacagaaaagctaaacagaagcattctcagaaacttctctgtgatgtttgtgttcaactcccagagtttcacattgcttttcatagagtagttctgaaacatgcttttcgtagtgtctgcaagtggacatttggagcgctttcaggcctgtggtggaaaacgaattatggtcacataaaaactggagagaagccttctcagaaacttctctgtgatgattgcattcaactcacagagttgaaccctcctatggatagagcagtgttgaaactctctttttgtggaatctgcaagtggatatgtggacctctccgaagatgtctttggaaacgggaatatcttcacataaaaactaaacagaagcattctcagaaacttcttggtgatgtttgcattcaaatcccagagttgaaccttcctttgatagttcaggtttgaaacactctttttgtaggatctgcaagtggatatttggaccactctgtggccttcgttcgaaacgggtatatcttcgcataaaatctagacagaagcattctcagaaaatactttgtgatgattgagtttaactcacagagctgaacattcctttggatggagcaggtttgagacacaccttttgtagaatctacaagtggatatttggacctctctgaggatttcgttggaaacgggataactgcacctaactaaacggaagcattctcagaaactgctttgtgatgattgcattcacctcacagagttgaacattcctattgatagagcagtttggaaacactcttgttgtggaatgtgcaagtggagatttggagcgctttgaggcctatggtagtaaagggaatagcttcatagaaaaactagacagatgcattctcaggtaactttttggtgatgtttgtattcaactcccagagttgaactttcctttggaaagagcagctatgaaacactctttttctagaatctgcaagtggacgtttggagggctttgtggtttgtggtggaaaaggaaatatcttcacctaaatactagatagaagcattctcagaagcttctctgtgatgactgcattcaactcacggagttgaacactccttttgagagcgcagttttgaaactctctttctgtggcatctgcaaggggacatgtagacctctttgaagatttcgttggaaacggaatcatctaacacataaaaactatacagaagcagtctcagaatcttctttgtgatgtttcgcattcaaatcccagagttgaactttcctttccaagttcacgtttgaaacactctttttgcaggatctacaagtggatatttggaccactctgtgtccttcgttcgaaacgggtatatcttcacatgacatctagacagaagctttctcagaaaattctttgggatgattgagttgaactcacagagctgagcattccttgcgatgtagcagtttagaaacacactttctgcagaatctgcaagtgcatatttggacctctgtgaggaattcgttggaaacgggataatttcagctgactaaacagaagcattctcagaaccttcttcgtgatgtctgcattcaactcacagtgtggaacctttctttgatagttcaggtttgaaacactctttttgtagaaactgcaaggggataattgcactctttgaggagtaccgtagtaaaggaaataacttcctataaaaagaagacagaagcattctcagaaccctcttcgtgatgtttgcagtcaactcacagtgctgaacctttctttgatagttcagctttgaaacactctttttgtagaaactgcaaatggatatttggtcctctctgaggatttcgttggaaaagggataaaacgcacagaactaaacagaagcattctcagaaccttcttcgtgatgtttgcattcaactcacagtgttgaacctttctttgatagttcaggtttgaaacggtctttctgtagaaactgcaagtagatatttggacctctctgaggatttcgttggaaacgggataacccgcacagaactaaaacagaagcattcacagaaaactcttggtgacgactgagtttaactcacagagctgaacattcctttggatggagcagtttcgaaacacactatttgtagaatgtgcaagtggatatttaggcctctctgaggatttcgttggaaacgggataaaccgcacagaactaaacagaagcattctcagaaactactttgtgatgattgcattcaagtcacagagttgaacattccctttgacagagcagtttggaaactctctttgtgtagaatctgcaagtggagatatggaccgctttgaggcctatggtagtaaaggaaatagcttcatataaaagctagacagtagcattctcagaaacttctttgtgatgcttgcattcaactcacagagttgaactttcctttcgagagagaagctttgaaacactctttttccagaatctgcaagtggacatttggagggctttgaggcctgtggtggaaaaggaattatcttcccgtaaaagctagatagaagcattgtcagaaacttctttgtgatgattgcattcaactcacagagttgaaggttccttttcaaagagcagtttccaatcactctttctgtggaatctgcaagtggatatttggacctattttgaagatttcgttggaaacgggagaatcttcacaggaaagctaaacagaagcattctcagaaacttctctgtgatgtttgtgttcaactcccagagtttcacattgcttttcatagagtagttctgaaacatgcttttcgtagtgtctacaagtggacatttggagcgctttcaggcctgtggtggaaaacgaattatggtcacataaaaactggagagaagccttctcagaaacttctctgtgatgattgcattcaactcacagagttgaaccctcctatggatagagcagtgttgaaactctctttttgtggaatctgcaagtggctatgtggacctctccgaagatgtctttggaaacgggaatatcttcacataaaaactaaacagaagcattctcagaaacttcttggtgatgtttgcattcaaatcccagagttgaaccttcctttgatagttcaggtttgaaacactctttttgtaggatctgcaagtggatatttggaccactctgtggccttcgttcgaaacgggtatatcttcgcataaaatctagacagaagcattctcagaaaatactttgtgatgattgagtttaactcacagagctgaacattcctttggatggagcaggtttgagacacactttttgtagaatctacaagtggatatttggacctctctgaggatttcgttggaaacgggataactgcacctaactaaacggaagcattctcagaaactgctttgtgatgattgcattcacctcacagagttgaacattcctattgatagagcagtttggaaacactcttgttgtggaatgtgcaagtggagatttggagcgctttgaggcctatggtagtaaagggaatagcttcatagaaaaactagacagatgcattctcaggaactttttggtgatgtttgtattcaactcccagagttgaactttcctttggaaagagcagctatgaaacactgtttttctagaatctgcaagtggacgtttggagggctttgtggtttgtggtggaaaaggaaatatcttcacctaaatactagatagaagcattctcagaagcttctctgtgatgactgcattcaactcacggagttgaacactccttttgagagcgcagttttgaaactctctttctgtggcatctgcaaggggacatgtagacctctttgaagatttcgttggaaacggaatcatcttcacataaaaactatacagaagcagtctcagaatcttctttgtgatgtttgcattcaaatccccgagttgaactttcctttcaaagttcacgtttgaaacactctttttgcaggatctacaagtggatatttggaccactctgtgtccttcgttcgaaacgggtatatcttcacatgacatctagacagaagctttctcagaaaattctttgggatgattgagttgaactcacagagctgagcattccttgcgatgtagcagtttagaaacacactttctgcagaatctgcaagtgcatatttggacctctgtgaggaattcgttggaaacgggataatttcagctgactaaacagaagcattctcagaaccttcttcgtgatgtctgcattcaactcacagtgtggaacctttctttgatagttcaggtttgaaacactctttttgtagaaactgcaaggggataattgcactctttgaggagtaccgtagtaaaggaaataacttcctataaaaagaagacagaagcattctcagaaccctcttcgtgatgtttgcattcaactcacagtgctgaacctttctttgatagttcagctttgaaacactctttttgtagaaagtgcaagtggatatttggtcctctctgaggatttcgttggaaacgggataaactgcacagaactaaacagaagcattctcagaaccttcttcgtgatgtttgcattcaactcacagtgttgaacctttctttgatagttcaggtttgaaacggtctttctgtagaaactgcaagtagatatttggacctctctgaggatttcgttggaaacgggataacccgcacagaactaaaacagaagcattcacagaaaactcttggtgacgaatgagtttaactcacagagctgaacattcctttggatggagcagtttcgaaacacactatttgtagaatgtgcaagtggatatttgggcctctctgaggatttcgttggaaacgggataaaccgcacagaactaaacagaagcattctcagaaactactttgtgatgattgcactcaagtcacagagttgaacattccctttgacagagcagtttggaaactctctttgtgtagaatctgcaagtggagatatggaacgctttgaggcctatggtagtaaaggaaatagcttcatataaaagctagacagtagcattctcagaaacttctttgtgatgcttgcattcaactcacagagttgaactttcctttcgagagagaagctttgaaacactctttttccagaatgtgcaagtggacatttggagggctttgaggcctgtggtggaaaaggaattatcttcccgtaaaagctagatagaagcattgtcagaaacttctttgtgatgattgcattcaactcacagagttgaaggttccttttcaaagagcagtttccaatcactctttctgtggaatctgcaagtggatatttcgacctattttgaagatttcgttggaaacgggagaatcttcacagaaaagctaaacagaagcattctcagaaacttctctgtgatgtttgtgttcaactcccagactttcacattgcttttcatagagtagttctgaaacatgcttttcgtagtgtctacaagtggacatttggagcgcttccagtcctgtggtggaaaacgaattatggtcacataaaaactggagagaagctttctcagaaacttctctgtgatgattgcattcaactcacagagttgaaccctcctatggatagagcagtgttgaaactctctttttgtggaatctgcaagtggatatgtggacctctccgaagatgtctttggaaacgggaatatcttcacataataactaaacagaagcattctcagaaacttcttggtgatgtttgcattcaaatcccagagttgaaccttcctttgacagttcaggtttgaaacactctttttgtaggatctgcaagtggatatttggaccactctgtggccttcgttcgaaacgggtacatcttcgcataaaatctagacagaagcattctcagaaaatactttgtgatgattgagttgaactcacagagctgaacattcctttggatggagcaggtttgagacacactttttgtagaatctacaagtggatatttggacctctctgaggatttcgttggaaacgggataactgcacctaactaaacggaagcattctcagaaactgctttgtgatgattgcattcacctcacagagttgaacattcctattgatagagcagtttggaaacactcttgttgtggaatgtgcaagtggagatttggagcgctttgaggcctatggtagtaaagggaatagcttcatagaaaaactagacagaatgcattctcagggaactttttggtgatgtttgtattcaactcccagagttgaactttcctttggaaagagcagctatgaaacactctttttctagaatctgcaagtggacgtttggagggctttgtggtttgtggtggaaaaggaaatatcttcacctaaatactagatagaagcattctcagaagcttctctgtgatgactgcattcaactcacggagttgaacactccttttgagagcgcagttttgaaactctctttctgtggcatccgcaaggggacatgtggacctctttgaagatttcgttggaaatggaatcatcttcacataaaaactatacagaagcagtctcagaatcttctttgtgatgtttgcattcaaatcccagagttgaactttcctttcaaagttcacgtttgaaacactctttttgcaggatctacaagtggatatttggaccactctgtgtccttcgttcgaaacgggtatatcttcacatgacatctagacagaagctttctcagaaaattctttgggatgattgagtggaactcacagagctgaacattccttgcgatgtagcagtttagaaacacactttctgcagaatctgcaagtgcatatttggacctctccgaggaattcgttggaaacgggataatttcagctgactaaacagaagcattctcagaaccttcttcgtgatgtctgcattcaactcacagtgtggaacctttctttgatagttcaggtttgaaacactctttttgtagaaactgcaaggggataattgcacttctttgaggcctaccgtagtaaaggaaataacttcctatagagagaagacagaagcattctcagaaccctcttcgtgatgtttgcattcaacacacagtgctgaacctttctttgatagttcagctttgaaacactcttcttgtagaaactgcaagtggatatttggtcctctctgaggatttcgttggaaacgggataaaccgcacagaactaaacagaagcattctcagaaccttcttcgtgatgtttgcattcaactcacagtgttgaacctttctttgatagttcaggtttgaaacggtctttctgtagaaactgcaagtagatatttggacctctctgaggatttcgttggaaacgggataacccgcacagaactaaaacagaagcattcacagaaaactcttggtgacgactgagtttaactcacagagctgaacattcctttggatggagcagtttcgaaacacactatttgtagaatgtgcaagtggatatttgggcctctctgaggatttcgatggaaacgggataaaccgcacagaactaaacagaagcattctcagaaactactttgtgatgattgcattcaagtcacagagttgaacattccctttgacagagcagtttggaaactctctttgtgtagaatctgcaagtggagatatggaccgctttgaggcctatggtagtaaaggaaatagcttcatataaaagctagacagtagcattctcagaaacttctttgtgatgcttgcattcaactcacagagttgaactttcctttcgagagagaagctttgaaacactctttttccagaatctgcaagtggacatttggagggctttgaggcctgtggtggaaaaggaattatcttcccgtaaaagctagatagaagcattgtcagaaacttctttgtgatgattgcattcaactcacagagttgaaggttccttttcaaagagcagtttccaatcactctttctgtggaatctgcaagtggatatttggacctattttgaagatttcgttggaaacgggagaatcttcacaggaaagctaaacagaagcattctcagaaacttctctgtgatgtttgtgttcaactcccagagtttcacattgcttttcatagagtagttctgaaacatgcttttcgtagtgtctacaagtggacatttggagcgctttcaggcctgtggtggaaaacgaattatggtcacataaaaactggagagaagccttctcagaaacttctctgtgatgattgcattcaactcacagagttgaaccctcctatggatagagcagtgttgaaactctctttttgtggaatctgcaagtggatacgtggacctctccgaagatgtctttggaaacgggaatatcttcacataaaaactaaacagaagcattctcagaaacttcttggtgatgtttgcattcaaatcccagagttgaaccttcctttgatagttcaggtttgaaacactctttttgtaggatctgcaagtggatatttggaccactctgtggccttcgttcgaaacgggtatatcttcgcataaaatctagacagaagcattctcagaaaatactttgtgatgattgagtttaactcacagagctgaatattcctttggatggagcaggcttgagacacactttttgtagaatctacaagtggatatttggacctctctgaggatttcgttggaaacgggataactgcaccgaactaaacggaagcattctcagaaactgctttgtgatgattgcattcacctcacagagttgaacattcctattgatagagcagtttggaaacactcttgttgtggaatgtgcaagtggagatttggagcgctttgaggcctatggtagtaaagggaatagcttcatagaaaaactagacagatgcattctcaggaactttttggtgatgtttgtattcaactcccagagttgaactttcctttggaaagagcagctatgaaacactgtttttctagaatctgcaagtggacgtttggagggctttgtggtttgtggtggaaaaggaaatatcttcacctaaatactagatagaagcatcctcagaagcttctctgtgatgactgcattcaactcacggagttgaacactccttttgagagcgcagttttgaaactctctttctgtggcatctgcaaggggacatgtagacctctttgaagatttcgttggaaacggaatcatcttcacataaaaactatacagaagcagtctcagaatcttctttgtgatgtttgcattcaaatccccgagttgaactttcctttcaaagttcacgtttgaaacactctttttgcaggatctacaagtggatatttggaccactctgtgtccttcgttcgaaacgggtatatcttcacatgacatctagacagaagctttctcagaaaattctttgggatgattgagttgaactcacagagctgagcattccttgcaatgtagcagtttagaaacacactttctgcagaatctgcaagtgcatatttggacctctgtgaggaattcgttggaaacgggataatttcagctgactaaacagaagcattctcagaaccttcttcgtgatgtctgcattcaactcacagtgtggaacctttctttgatagttcaggtttgaaacactctttctgtagaaactgcaaggggataattgcactctttgaggagtaccgtagtaaaggaaataacttcctataaaaagaagacagaagcattctcagaaccctcttcgtgatgtttgcattcaactcacagtgctgaacctttctttgatagttcagctttgaaacactctttttgtagaaactgcaagtggatatttggtcctctctgaggatttcgttggaaacgggataaactgcacagaactaaacagaagcattctcagaaccttcttcgtgatgtttgcattcaactcacagtgttgaacctttctttgatagttcaggtttgaaacggtctttctgtagaaactgcaagtagatatttggacctctctgaggatttcgttggaaacgggataacccgcacagaactaaaacagaagcattcacagaaaactcttggtgacgactgagtttaactcacagagctgaacattcctttggatggagcagtttcgaaacacactatttgtagaatgtgcaagtggatatttgggcctctctgaggatttcgttggaaacgggataaaccgcacagaactaaacagaagcattctcagaaactactttgtgatgattgcattcaagtcacagagttgaacattccctttgacagagcagtttggaaactctctttgtgtagaatctgcaagtggagatatgaaccgctttgaggcctatggtagtaaaggaaatagcttcatataaaagctagacagtagcattctcagaaacttctttgtgatgcttgcattcaactcacagagttgaactttcctctcgagagagaagctttgaaacactctttttacagaatttgcaagtggacatttggagggctttgaggcctgtggtggaaaaggaattatcttcccgtaaaagctagatagaagcattgtcagaaacttctttgtgatgattgcattcaactcacagagttgaaggttgcttttcaaacagcagtttccaaacactctttctgtggaatctgcaagtggatatttggacctctttgaagatttcgttggaaaagggataaacctcacagaaaagctaaacaaaagcattctcagaaacttctctgtgatgtttgtgttcaactcccagagtgtcacattgcttctcatagagtagttctgaaacatgcttttcgtagtgtctgcaagaggacatttggagcgctttcaggcctgtggtggaaaacgaattatggtcacatataaactggagagaagccttctcagaaacttctctgtgatgattgcattcaactcacagagttgaaccctcctatggatagagcagtgttgaaactctctttttgtggaacctgcaagtggatatgtggacctctccgaagatgtctttggaaacgggaatatcttcacataaaaactaaacagaagcattctcagaaacttcttggtgatgtttgcattcaaatcccagagttgaaccttcctttgatagttcaggtttgaaacactctttctgtaggatctgcaagtggctatttggaccactctgtggccttcgttcgaaacgggtatatcttcgcataaaatctagacagaagcattctcagaaaatactttgtgatgattgagtttaaatcacagagctgaccattcctttggatggagcaggtttgagacacactttttgtagaatctacaagtggatatttggacctctctgaggatttcgttggaaacgggataactgcacctaactaaacggaagcattctcagaaactgctttgtgatgattgcattcacctcacagagttgaacattcctattgatagagcagtttggaaacactcttgttgtggaatgtgcaagtggagatttggagcgctttgaggcctatggtagtaaagggaatagcttcatagaaaaactagacagatgcattctcaggaactttttggtgatgtttgtattcaactcccagagttgaactttcctttggaaagagcagctatgaaacactctttttctagaatctgcaagtggacgtttggagggctttgtggtttgtggtggaaaaggaaatatcttcacctaaatactagatagaagcattctcagaagcttctctgtgatgactgcattcaactcacggagttgaacactccttttgagagcgcagttttgaaactctctttctgtggcatctgcaaggggacatgtagacctctttgaagatttcgttggaaacggaatcatcttcacataaaaactatacagaagcagtctcagaatcttctttgtgatgtttgcattcaaatcccagagttgaactttcctttcaaagttcacgtttgaaacactctttttgcaggatctacaagtggatatttggagcactctgtgtccttcgttcgaaacgggtatatcttcacatgacatctagacagaagctttctcagaaaattctttgggatgattgagtggaactcacagagctgaacattccttgcgatgtagcagtttagaaacacactttctgcagaatctgcaagtgcatatttggacctctctgaggaattcgttggaaacgggataatttcagctgactaaacagaagcattctcagaaccttcttcgtgatgtctgcattcaactcacagtgtggaacctttctttgatagttcaggtttgaaacactctttttgtagaaactgcaaggggataattgcacttctttgaggcctaccgtagtaaaggaaataacttcctatagaaagaagacagaagcattctcagaaccctcttcgtgatgtttgcattcaactcacagtgctgaacctttctttgatagttcagctttgaaacactcttcttgtagaaactgcaagtggatatttggtcctctctgaggatttcgttggaaacgggataaaccgcacagaactaaacagaagaattctcagagccctcttcgtgatgtttgcattcaactcacagtgctgaacctttctttgatagtgcagctttgaaacactctttttgtagaaactgcaagtggatgtttggtcctctctgaggatttcgttggaaacgggataaaccgcacagaactaaaacagaagcattgtcagaaacttctttgtgatgattgcattcaactcacagagttgaaggttccttttcaaacagcagtttccaatcactctttctgtggaatctgcaagtggatatttgggcctctctgaggatttcgttggaaacgggataaaacgcacagaactaaaacagaagcattctcagaaacttctctgtgatgtttgtgttcaactcccagagtttcacgttgcttttcatagagtagttctgaaacatgcttttcgtagtgtctgcaagtggacatttggagcgctttcaggcctgtggtggaaaacgaattatggtcacataaaaactggagagaagccttctcagaaacttctctgtgatgattgcattcaactcacagagttgaaccctcctatggatagagcagtgttgaaactctctttttgtggaatctgcaagtggatatgtggacctctccgaagatgtctttggaaacgggaatatcttcacataaaaactaaacagaagcattctcagaaacttcttggtgatgtttgcattcaaatcccagagttgaaccttcctttgatagttcaggtttgaaacactctttctgtaggatctgcaagtggctatttggaccactctgtggccttcgttcgaaacgggtatatcttcgcataaaatctagacagaagcattctcagaaaatactttgtgatgattgagtttaaatcacagagctgaccattcctttggatggagcaggtttgagacacactttttgtagaatctacaagtggatatttggacctctctgaggatttcgttggaaacgggataactgcacctaactaaacggaagcattctcagaaactgctttgtgatgattgcattcacctcacagagttgaacattcctattgatagagcagtttggaaacactcttgttgtggaatgtgcaagtggagatttggagcgctttgaggcctatggtagtaaagggaatagcttcatagaaaaactagacagatgcattctcaggaactttttggtgatgtttgtattcaactcccagagttgaactttcctttggaaagagcagctatgaaacactctttttctagaatctgcaagtggacgtttggagggctttgtggtttgtggtggaaaaggaaatatcttcacctaaatactagatagaagcattctcagaagcttctctgtgttgactgcattcaactcacggagttgaacactccttttgagagcgcagttttgaaactccctttctgtgtcatctgcaaggggacatgtagacctctttgaagatttcattggaaacagaatcatcttcacataaaaactatacagaagcagtctcagaatcttctttgtgatgtttgcattcaaatcccagagttgaatttcctttcaaagttcacgtttgaaacactctttttgcaggatctacaagtgaatatttggaccactctgtgtccttcgttcgaaacgggtatatctttacatgacatctagacagaagctttctcagaaaattctttgggatgattgagtggaactcacagagctgaacattccttgcgatgtagcagtttagaaacacactttctgcagaatctgcaagtgcatatttggacctctctgaggaattcgttggaaacgggataatttcagctgactaaacagaagcattctcagaaccttcttcgtgatgtctgcattcaactcacagtgtggaacctttctttgatagttcaggtttgaaacactctttttgtagaaactgcaaggggataattgcacttctttgaggcctaccgtagtaaaggaaataacttcctataaaaagaagacagaagcattctcagaaccctcttcgtgatgtttgcattcaactcacagtgctgaacctttctttgatagttcagctttgaaacactcttcttgtagaaactgcaagtggatatttggtcctctctgaggatttcgttggaaacgggataaaccgcacagaactaaacagaagaattctcagagccctcttcgtgatgtttgcattcaactcacagtgctgaacctttctttgatagtgcagctttgaaacactctttttgtagaaactgcaagtggatatttggtcctctctgaggatttcgttggaaacgggataaaccgcacagaactaaaacagaagcgttgtcagaaacttctttgtgatgattgcattcaactcacagagttgaaggttccttttcaaacagcagtttccaatcactctttctgtggaatctgcaagtggatatttgggcctctctgaggatttcgttggaaacgggataaaacgcacagaactaaaacagaagcattctcagaaacttctctgtgatgtttgtgttcaactcccagagtttcacgttgcttttcatagagtagttctgaaacatgcttttcgtagtgtctgcaagtggacatttggagcgctttcaggcctgtggtggaaaacgaattatggtcacataaaaactggagagaagccttctcagaaacttctctgtgatgattgcattcaactcacagagttgaaccctcctatggatagagcagtgttgaaactctctttttgtggaatctgcaagtggatatgtggacctctccgaagatgtctttggaaacgggaatatcttcacataaaaactaaacagaagcattctcagaaacttcttggtgatgtttgcattcaaatcccagagttgaaccttcctttgatagttcaggtttgaaacactctttctgtaggatctgcaagtggctatttggaccactctgtggccttcgttcgaaacgggtatatcttcgcataaaatctagacagaagcattctcagaaaatactttgtgatgattgagtttaaatcacagagctgaccattcctttggatggagcaggtttgagacacactttttgtagaatctacaagtggatatttggacctctctgaggatttcgttggaaacgggataactgcacctaactaaacggaagcattctcagaaactgctttgtgatgattgcattcacctcacagagttgaacattcctattgatagagcagtttggaaacactcttgttgtggaatgtgcaagtggagatttggagcgctttgaggcctatggtagtaaagggaatagcttcatagaaaaactagacagatgcattctcaggaactttttggtgatgtttgtattcaactcccagagttgaactttcctttggaaagagcagctatgaaacactctttttctagaatctgcaagtggacgtttggagggctttgtggtttgtggtggaaaaggaaatatcttcacctaaatactagatagaagcattctcagaagcttctctgtgatgactgcattcaactcacggagttgaacactccttttgagagcgcagttttgaaactctctttctgtggcatctgcaaggggacatgtagacctctttgaagatttcgttggaaacggaatcatcttcacataaaaactatacagaagcagtctcagaatcttctttgtgatgtttgcattcaaatcccagagttgaactttcctttcaaagttcacgtttgaaacactctttttgcaggatctacaagtggatatttggaccactctgtgtccttcgttcgaaacggttatatcttcacatgacatctagacagaagctttctcagaaaattctttgggatgattgagttgaactcacagagctgagcattccttgcgatgtagcagtttagaaacacactttctgcagaatctgcaagtgcatatttggacctctctgaggaattcgttggaaacgggataatttcagctgactaaacagaagcattctcagaaccttcttcgtgatgtctgcattcaactcacagtgtggaacctttctttaatagttcaggtttgaaacactctttttgtagaaactgcaaggggataattgcactctttgaagagtaccgtagtaaaggaaataacttcctataaaaagaagacagaagcattctcagaaccctcttcgtgatgtttgcattcaactcacagtgctgaacctttctttgatagttcagctttgaaacactctttttgtagaaactgcaagtggatatttggtcctctctgaggatttcgttggaaacgggataaactgcacagaactaaacagaagcattctcagaaccttcttcgtgatgtttgcattcaactcacagtgttgaacctttctttgatagttcaggtttgaaacggtctttctgtagaaactgcaagtagatatttggacctctctgaggatttcgttggaaacgggataacccgcacagaactaaaacagaagcattcacagaaaactcttggtgacgactgagtttaactcacagagctgaacattcctttggatggagcagtttcgaaacacactatttgtagaatgtgcaagtggatatttgggcctctctgaggatttcgttggaaacgggataaaccgcacagaactaaacagaagcattctcagaaactactttgtgatgattgcattcaagtcacagagttgaacattccctttgacagagcagtttggaaactctctttgtgtagaatctgcaagtggagatatggaccgctttgaggcctatggtagtaaaggaaatagcttcatataaaagctagacagtagcattctcagaaacttctttgtgatgcttgcattcaactcacagagttgaactttcctttcgagagagaagctttgaaacactgtttttccagaatctgcaagtggacatttggagggctttgaggcctgtggtggaaaaggaattaacttcccataaaagctagatagaagcattgtcagaaacttctttgtgatgattgcatttaactcacagagttgaaggttccttttcaaacagcagtttccaatcactctttctgtggaatctgcaagtggatatttggaccgctttgaagatttcgttggaaacgggagaatcttcacagaaaagctaaacagaagcattctcagaaacttctctgtgatgtttgtgttcaactcccagagtttcacgttgcttttcatagagtagttctgaaacatgcttttcgtagtgtctgcaagtggacatttggagcgctttcaggcctgtggtggaaaacgaattatggtcacataaaaactggagagaagccttctcagaaacttctctgtgatgattgcattcaactcacagagttgaaccctcctatggatagagcagtgttgaaactctctttttgtggaatctgcaagtggatatgtggacctctccgaagatgtctttggaaacgggaatatcttcacataaaaactaaacagaagcattctcagaaacttcttggtgatgtttgcattcaaatcccagagttgaaccttcctttgatagttcaggtttgaaacactctttctgtaggatctgcaagtggctatttggaccactctgtggccttcgttcgaaacgggtatatcttcgcataaaatctagacagaagcattctcagaaaatactttgtgatgattgagtttaaatcacagagctgaccattcctttggatggagcaggtttgagacacactttttgtagaatctacaagtggatatttggacctctctgaggatttcgttggaaacgggataactgcacctaactaaacggaagcattctcagaaactgctttgtgatgattgcattcacctcacagagttgaacattcctattgatagagcagtttggaaacactcttgttgtggaatgtgcaagtggagatttggagcgctttgaggcctatggtagtaaagggaatagcttcatagaaaaactagacagatgcattctcaggaaccttttggtgatgtttgtattcaactcccagagttgaactttcctttggaaagagcagctatgaaacactctttttctagaatctgcaagtggacgtttggagggctttgtggtttgtggtggaaaaggaaatatcttcacctaaatactagatagaagcattctcagaagcttctctgtgatgactgcattcaactcacggagttgaacactccttttgagagcgcagttttgaaactctctttctgtggcatctgcaaggggacatgtagacctctttgaagatttcgttggaaacggaatcatcttcacataaaaactatacagaagcagtctcagaatcttctttgtgatgtttgcattcaaatcccagagttgaactttcctttcaaagttcacgtttgaaacactctttttgcaggatctacaagtggatatttggaccactctgtgtccttcgttcgaaacgggtatatcttcacacgacatctagacagaagctttctcagaaaattctttgggatgattgagtggaactcacagagctgaacattccttgcgatggagcagtttagaaacacactttctgcagaatctgcaagtgcatatttggacctctctgaggaattcgttggaaacgggataatttcagctgactaaacagaagcattctcagaaccttcttcgtgatgtctgcattcaactcacagtgtggaacctttctttgatagttcaggtttgaaacactctttttgtagaaactgcaaggggataattgcacttctttgaggcctaccgtagtaaaggaaataacttcctatagaaagaagacagaagcattctcagaaccctcttcgtgatgtttgcattcaactcacagtgctgaacctttctttgatagttcagctttgaaacactcttcttgtagaaactgcaagtggatatttggtcctctctgaggatttcgttggaaacgggataaaccgcacagaactaaacagaagaattctcagagccctcttcgtgatgtttgcattcaactcacagtgctgaacctttctttgatagtgcagctttgaaacactctttttgtagaaactgcaagtggatgtttggtcctctctgaggatttcgttggaaacgggataaaccgcacagaactaaaacagaagcattgtcagaaacttctttgtgatgattgcattcaactcacagagttgaaggttccttttcaaacagcagtttccaatcactctttctgtggaatctgcaagtggatatttgggcctctctgaggatttcgttggaaacgggataaaacgcacagaactaaaacagaagcattctcagaaacttctctgtgatgtttgtgttcaactcccagagtttcacgttgcttttcatagagtagttctgaaacatgcttttcgtagtgtctgcaagtggacatttggagcgctttcaggcctgtggtggaaaacgaattatggtcacataaaaactggagagaagccttctcagaaacttctctgtgatgattgcattcaactcacagagttgaaccctcctatggatagagcagtgttgaaactctctttttgtggaatctgcaagtggatatgtggacctctccgaagatgtctttggaaacgggaatatcttcacataaaaactaaacagaagcattctcagaaacttcttggtgatgtttgcattcaaatcccagagttgaaccttcctttgatagttcaggtttgaaacactctttctgtaggatctgcaagtggctatttggaccactctgtggccttcgttcgaaacgggtatatcttcgcataaaatctagacagaagcattctcagaaaatactttgtgatgattgagtttaaatcacagagctgaccattcctttggatggagcaggtttgagacacactttttgtagaatctacaagtggatatttggacctctctgaggatttcgttggaaacgggataactgcacctaactaaacggaagcattctcagaaactgctttgtgatgattgcattcacctcacagagttgaacattcctattgatagagcagtttggaaacactcttgttgtggaatgtgcaagtggagatttggagcgctttgaggcctatggtagtaaagggaatagcttcatagaaaaactagacagatgcattctcaggaaccttttggtgatgtttgtattcaactcccagagttgaactttcctttggaaagagcagctatgaaacactctttttctagaatctgcaagtggacgtttggagggctttgtggtttgtggtggaaaaggaaatatcttcacctaaatactagatagaagcattctcagaagcttctctgtgatgactgcattcaactcacggagttgaacactccttttgagagcgcagttttgaaactctctttctgtggcatctgcaaggggacatgtagacctctttgaagatttcgttggaaacggaatcatcttcacataaaaactatacagaagcagtctcagaatcttctttgtgatgtttgcattcaaatcccagagttgaactttcctttcaaagttcacgtttgaaacactctttttgcaggatctacaagtggatatttggaccactctgtgtccttcgttcgaaacgggtatatcttcacacgacatctagacagaagctttctcagaaaattctttgggatgattgagtggaactcacagagctgaacattccttgcgatgtagcagtttagaaacacactttctgcagaatctgcaagtgcatatttggacctctctgaggaattcgttggaaacgggataatttcagctgactaaacagaagcattctcagaaccttcttcgtgatgtctgcattcaactcacagtgtggaacctttctttgatagttcaggtttgaaacactctttttgtagaaactgcaaggggataattgcacttctttgaggcctaccgtagtaaaggaaataacttcctatagaaagaagacagaagcattctcagaaccctcttcgtgatgtttgcattcaactcacagtgctgaacctttctttgatagttcagctttgaaacactcttcttgtagaaactgcaagtggatatttggtcctctctgaggatttcgttggaaacgggataaaccgcacagaactaaacagaagaattctcagagccctcttcgtgatgtttgcattcaactcacagtgctgaacctttctttgatagtgcagctttgaaacactctttttgtagaaactgcaagtggatgtttggtcctctctgaggatttcgttggaaacgggataaaccgcacagaactaaaacagaagcattgtcagaaacttctttgtgatgattgcattcaactcacagagttgaaggttccttttcaaacagcactttccaatcactctttctgtggaatctgcaagtggatatttgggcctctctgaggatttcgttggaaacgggataaaacgcacagaactgaaacagaagcattctcagaaacttctctgtgatgtttgtgttcaactcccagagtttcacgttgcttttcatagagtagttctgaaacatgcttttcgtagtgtctgcaagtggacatttggagcgctttcaggcctgtggtggaaaacgaattatggtcacataaaaactggagagaagccttctcagaaacttctctgtgatgattgcattcaactcacagagttgaaccctcctatggatagagcagtgttgaaactctctttttgtggaatctgcaagtggatatgtggacctctccgaagatgtctttggaaacgggaatatcttcacataaaaactaaacagaagcattctcagaaacttcttggtgatgtttgcattcaaatcccagagttgaaccttcctttgatagttcaggtttgaaacactctttctgtaggatctgcaagtggctatttggaccactctgtggccttcgttcgaaacgggtatatcttcgcataaaatctagacagaagcattctcagaaaatactttgtgatgattgagtttaaatcacagagctgaccattcctttggatggagcaggtttgagacacactttttgtagaatctacaagtggatatttggacctctctgaggatttcgttggaaacgggataactgcacctaactaaacggaagcattctcagaaactgctttgtgatgattgcattcacctcacagagttgaacattcctattgatagagcagtttggaaacactcttgttgtggaatgtgcaagtggagatttggagcgctttgaggcctatggtagtaaagggaatagcttcatagaaaaactagacagatgcattctcaggaactttttggtgatgtttgtattcaactcccagagttgaactttcctttggaaagagcagctatgaaacactctttttctagaatctgcaagtggacgtttggagggctttgtggtttgtggtggaaaaggaaatatcttcacctaaatactagatagaagcattctcagaagcttctctgtgatgactgcattcaactcacggagttgaacactccttttgagagcgcagttttgaaactctctttctgtggcatctgcaaggggacatgttgacctctttgaagatttcgttggaaacggaatcatcttcacataaaaactatacagaagcattctcagaaacttcttggtgatgtttgcattcaaatcccagagttgaaccttcctttgatagttcaggtttgaaactctctttttgtaggatctgcaagtggatatttggaccactctgtggccttcgttcgaaacgggtacatcttcgcaaaaaatctagacagaagctttctcagaaaattctttgggatgattgagttgaactcacagagctgaacattccttgcgatggagcagtttagaaacacactttctgcagaatctgcaagtgcatatttggacctctctgaggaattcgttggaaacgggataactgcacctaactaaacggaagcattctcagaaccttcttcgtgatgtctgcattcaactcacagtgtggaacctttctttgatagttcaggtttgaaacactctttttgtagagactgcaaggggataattgcacttctttgaggcctaccatagtaaaggaaataacttcctataaaaagaagacagaagcattctcagaaccctcttcgtgatgtttgcattcaactcacagtgctgaaactttctttgatagttcagctttgaaacactctttttgtagaaactgcaagtggatacttggtcctctctgaggatttcgttggaaaagggataaaccgcacagaactaaacagaagcattcacagaaaactcttggtgacgactgagtttaactcacagagctgaacattcctttggatggagcagtttcgaaacacactatttgtagaatctgcaagtggatatttgggcctctctgaggatttcgatggaaacgggataaaccgcacagaactaaaacagaagcattctcagaaactagtttgtgatgattgcattcaagtcacagagctgaacattccctttgacagagcagtttggaaactctctttgtgtagaatctgcaagtggagatatggaatgctttgaggactatggtagtaaaggaaatagcttcatataaaagctagacagtagcattctcagaaacttctttgtgatgcttgcattcaactcacagagttgaactttcctttcgagagagaagctttgaaacactctttttccagaatctgcaagtggacatttggagggctttgaggcttgtggtggaaaaggaattatcttcccgtaaaagctagatagaagcattgtcagaaacttctttgtgatgattgcattcaactcacagagttgaaggttccttttcaaacagcagtttccaaacaccctttctgtggaatctgcaagtggatgtttggacctcttggaagatttcgttggaaacgggagaatcttcacagaaaagctaaacagaagctttctcagaaacttctctgtgacgtttgtgttcaactcccagagtttcacattgcttttcatagagtagttctgaaacatgcttttcgtactgtctgcaagtggaggtttggagcgctttcagacctgtggtggaaaacgaattatggtcaaataaaaactggagagaagccttctcagaaacttctctgtgatgattgcattcaactcacagagttgaaccctcctatggatagagcagtgttgaaactctctttttgtggaatctgcaagtggatatgtggacctctccgaagatgtctttggaaacgggaatatcttcacataaaaactaaacacaagcattctcagaaacttcttggtgatgtttgcattcaaatcccagagttgaaccttcctttgatagttcaggtttgaaacactctttttgtaggatctgcaagtggatatttggaccactctgtggccttcgttcgaaacgggtatatcttcgcataaaatctagacagaagcattctcagaaaatactttgtgatgattgagtttaactcacagagctgaacattcctttggatggagcaggtttgagacacaccttttgtagaatctacaagtggatatttggacctctctgaggatttcgttggaaacgggataactgcacctaactaaacggaagcattctcagaaactgctttgtgatgattgcattcacctcaccagagttgaacattcctattgatagagcagtttggaaacactcttgttgtggaatgtgcaagtggagatttggagcgctttgaggcctatggtagtaaagggaatagcttcatagaaaaactagacagatgcattctcaggaactttttggtgatgtttgtattcaactcccagcagttgaactttcctttggaaagagcagctatgaaacactctttttctagaatctggaagtggacgtttggagggctttgtggtttgtggtggaaaaggaaatatcttcacctaaatactagatagaagcattctcagaagcttctctgtgatgactgcattcaactcacggagttgaacactccttttgagagcgcagttttgaaactctctttctgtggcatccgcaaggggacatgtaaacctctttgaagatttcattggaaacgcaatcatcttcacataaaaactatacagaagcagtctcagaatcttctttgtggtgtttgcattcaaatcccagagttgaactttcctttcaaagttcacgtttgaaacactctttttgcaggatctacaagtggatatttggaccactctgtgtccttcgttcgaaacgggtatatcttcacatgacatctagacagaagctttctcagaaaattctatgggatgattgagtggaactcacagagctgaacattccttgcgatgtagcagtttagaaacacactttctgcagaatctgcaagtgcatatttggacctctctgaggaattcgttggaaacgggataatttcagctgactaaacagaagcattctcagaaccttcttcgtgatgtctgcattcaactcacagtgtggaacctttctttgatagttcaggtttgaaacactctttttgtagaaactgcaaggggataattgcacttctttgaggcctaccgtagtaaaggaaataacttcctatagaaagaagacagaagcattctcagaaccctcttcgtgatgtttgcattcaactcacagtgctgaacctttctttgatagttcagctttgaaacactcttcttgtagaaactgcaagtggatatttggtcctctctgaggatttcgttggaaacgggataaaccgcacagaactaaacagaagaattctcagagccctcttcgtgatgtttgcattcaactcacagtgctgaacctttctttgatagtgcagctttgaaacactctttttgtagaaactgcaagtggatgtttggtcctctctgaggatttcgttggaaacgggataaaccgcacagaactaaaacagaagcattgtcagaaacttctttgtgatgattgcattcaactcacagagttgaaggttccttttcaaacagcagtttccaatcactctttctgtggaatctgcaagtggatatttgggcctctctgaggatttcgttggaaacgggataaaacgcacagaactaaaacagaagcattctcagaaacttctctgtgatgtttgtgttcaactcccagagtttcacgttgcttttcatagagtagttctgaaacatgcttttcgtagtgtctgcaagtggacatttggagcgctttcaggcctgtggtggaaaacgaattatggtcacataaaaactggagagaagccttctcagaaacttctctgtgatgattgcattcaactcacagagttgaaccctcctatggatagagcagtgttgaaactctctttttgtggaatctgcaagtggatatgtggacctctccgaagatgtctttggaaacgggaatatcttcacataaaaactaaacagaagcattctcagaaacttcttggtgatgtttgcattcaaatcccagagttgaaccttcctttgatagttcaggtttgaaacactctttttgtaggatctgcaagtggctatttggaccactctgtggccttcgtttgaaacgggtatatcttcgcataaaatctagacagaagcattctcagaaaatactttgtgatgattgagttttaatcacagagctgaacattcctttggatggagcaggtttgagacacactttttgtagaatctacaagtggatatttggacctctctgaggatttcgttggaaacgggataactgcacctaactaaacggaagcattctcagaaactgctttgtgatgattgcattcacctcacagagttgaacattcctattgatagagcagtttggaaacactcttgttgtggaatgtgcaagtggagatttggagcgctttgaggcctatggtagtaaagggaatagcttcatagaaaaactagacagatgcattctcaggaactttttggtgatgtttgtattcaactcccagagttgaactttcctttggaaagagcagctatgaaacactctttttctagaatctgcaagtggacgtttggagggctttgtggtttgtggtggaaaaggaaatatcttcacctaaatactagatagaagcattctcagaagcttctctgtgatgactgcattcaactcacggagttgaacactccttttgagagcgcagttttgaaactctctttctgtggcatctgcaaggggacatgtagacctctttgaagatttcgttggaaacggaatcatcttcacataaaaactatacagaagcagtctcagaatcttctttgtgatgtttgcattcaaatcccagagttgaactttcctttcaaagttcacgtttgaaacactctttttgcaggatctacaattggatatttggaccactttgtgtccttcgttcgaaacgggtatatcttcacatgacatctagtcagaagctttctcagaaaattctttgggattattgagtggaactcacagagctgaacattccttgcgatgtagcagtttagaaacacactttctgcagaatctgcaagtgcatatttggacctctctgaggaattcgttggaaacgggataatttcagctgactaaacagaagcattctcagaaccttcttcgtgatgtctgcattcaactcacagtgtggaacctttctttgatagttcaggtttgaaacactctttttgtagaaactgcacggggataattgcacttctttgaggcctaccgtagtaaaggaaataacttcctatagaaagaagacagaagcattctcagaaccctcttcgtgatgtttgcattcaactcacagtgctgaacctttctttgatagttcagctttgaaacactcttcttgtagaaactgcaagtggatatttggtcctctctgaggatttcgttggaaacgggataaaccgcacagaactaaacagaaattctcagagccctcttcgtgatgtttgcattcaactcacagtgctgaacctttctttgatagtgcagctttgaaacactctttttgtagaaactgcaagtggatgtttggtcctctctgaggatttcgttggaaacgggataaaccgcacagaactaaaacagaagcattctcagaaccttcttcgtgatgtttgcattcaactcacagtgttgaacctttctttgatagttcaggtttgaaacggtctttctgtagaaactgcaagtagatatttggacctctctgaggatttcgttggaaacgggataacccgcacagaactaaaacagaagcattcacagaaaactcttggtgacgactgagtttaactcacagagctgaacattcctttggatggagcagtttcgaaacacactatttgtagaatgtgcaagtggatatttgggcctctctgaggatttcgttggaaacgggataaaccgcacagaactaaacagaagcattctcagaaactactttgtgatgattgcattcaagtcacagagttgaacattccctttgacagagcagtttggaaactctctttgtgtagaatctgcaagtggagatatggaccgctttgaggcctatggtagtaaaggaaatagcttcatataaaagctagacagtagcattctcagaaacttctttgtgatgcttgcattcaactcacagagttgaactttcctttcgagagagaaactttgaaacactccttttccagaatctgcaagtggacatttggagggctttgaggcctgtggtggaaaaggaattatcttcccgtaaaagctagatagaagcattgtcagaaacttctttgtgatgattgcattcaactcacagagttgaaggttccttttcaaagagcagtttcaaatcactctttccgtggaatctgcaagtggatatttggacctctttgaagattttgttggaaacgggagaatcttcacagaaaagctaaacagaagcattctcagaaacttctctgtgatgtttgagttcaactcccagagtttcacattgcttttcatagagtagttctgaaacatgcttttcgtactgtctacaagtggacatttggagcgctttcaggcctgtggtggaaaacgaattatggtcacataaaaactggagagaagccttctcagaaacttctctgtgatgattgcattcaactcacagagttgaaccctcctatggatagagcagtgttgaaactctctttttgtggaatctgcaagtggatatgtggacctctccgaagatgtctttggaaacgggaatatcttcacataaaaactaaacagaagcattctcagaaacttcttggtgatgtttgcattcaaatcccagagtcgaaccttcctttgatagttcaggtttgaaacactctttttgtaggatctgcaagtggatatttggaccactctgtggccttcgttcgaaacgggtatatcttcgcataaaatctagacagaagcattctcagaaaatactttgtgatgattgagtttaactcacagagctgaacattcctttggatggagcaggtttgagacacactttttgtagaatctacaagtggatatttggacctctctgaggatttcgttggaaacgggataactgcacctaactaaacggaagcattctcagaaactgctttgtgatgattgcattcacctcacagagttgaacattcctattgatagagcagtttggaaacactcttgttgtggaatgtgcaagtggagatttggagcgctttgaggcctatggtagtaaagggaatagcttcatagaaaaactagacagatgcattctcaggaactttttggtgatgtttgtattcaactcccagagttgaactttcctttggaaagagcagctatgaaacactgtttttctagaatctgcaagtggacgtttggagggctttgtggtttgtggtggaaaaggaaatatcttcacctaaatactagatagaagcatcctcagaagcttctctgtgatgactgcattcaactcacggagttgaacactccttttgagagcgcagttttgaaactctctttctgtggcatctgcaaggggacatgtagacctctttgaagatttcgttggaaacggaatcatcttcacataaaaactacacagaagcagtctcaagaatcttctttgtgatgtttgcattcaaatccccgagttgaactttcctttcaaagttcacgtttgaaacactctttttgcaggatctacaagtggatatttggaccactctgtgtccttcgatcgaaacgggtatatcttcacatgacatctagacagaagctttctcagaaaattctttgggatgattgagttgaactcacagagctgagcattccttgcgatgtagcagtttagaaacacactttctgcagaatctgcaagtgcatatttggacctctgtgaggaattcgttggaaacgggataatttcagctgactaaacagaagcattctcagaaccttcttcgtgatgtctgcattcaactcacagtgtggaacctttctttgatagttcaggtttgaaacactctttttgtagaaactgcaaggggataattgcactctttgaggagtaccgtagtaaaggaaataacttcctataaaaagaagacagaagcattctcagaaccctcttcgtgatgtttgcattcaactcacagtgctgaacctttatttgatagttcagctttgaaacactctttttgtagaaactgcaagtggatatttggtcctctctgaggatttcgttggaaacgggataaactgcacagaactaaacagaagcattctcagaaccttcttcgtgatgtttgcattcaactcacagtgttgaacctttctttgatagttcaggtttgaaacggtctttctgcagaaactgcaagtagatatttggaccgctctgaggatttcgttggaaacgggataacccgcacagaactaaaacagaagcattcacagaaaactcttggtgacgactgagtttaactcacagagctgaacattcctttggatggagcagtttcgaaacacactatttgtagaatgtgcaagtggatatttaggcctctctgaggatttcgttggaaacgggataaaccgcacagaactaaacagaagcattctcagaaactactttgtgatgattgcattcaagtcacagagttgaacattccctttgacagagcagtttggaaactctctttgtgtagaatctgcaagtggagatatggaccgctttgaggcctatggtagtaaaggaaatagcttcatataaaagctagacagtagcattctcagaaacttctttgtgatgcttgcattcaactcacagagttgaactttcctttcgagagagaagctttgaaacactctttttccagaatctgcaagtggacatttggagggctttgaggcctgtggtggaaaaggaattatcttcccgtaaaagctagatagaagcattgtcagaaacttctttgtgatgattgcattcaactcacagagatgaaggttccttttcaaacagcagtttccaaacagtctttctgtggaatctgcaagtggatatttggacctctttgaagatttcgttggaaacgggagaatcttcacagaaaagctaaacagaagcattctcagaaacttctctgtgatgtttgtgttcaactcccagagtttcacgttgcttttcatagagtagttctgaaacatgcttttcgtagtgtctgcaagtggacatttggagcgctttcaggcctgtggtgcaaaacgaattatggtcccataaaaactggagagaagccttctcagaaacttctctgtgatgattgcattcaactcacagatttgaaccctcctatggatagagcattgttgaaactctctttttgtggaatctgcaagtggatatgtggacctctccgaagatgtctttggaaacgggaatatcttcacataaaaactaaacagaagcattctcagaaacttcttggtgatgtttgcattcaaatcccagagttgaaccttcctgtgatagttcaggtttgaaacactctttttgtaggatctgcaagtggatatttggaccactctgtggccttcgttcgaaacgggtacatcttcacataaaatctagacagaagcattctcagaaaatactttgtgatgattgagtttaactcacggagctgaacattcctttggatggagcaggtttgagacacactttttgtagaatctacaagtggatattgggacctctctgaggatttcgttggaaacgcgataactgcacctaactaaacggaagcattctcagaaactgctttgtgatgattgcattcacctcacagagttgaacattcctattgatagagcagtttggaaacactcttgttgtggaatgtgcaagtggagatttggagcgctttgaggcctatggtagtaaagggaatagcttcatagaaaaactagacagatgcattctcaggaactttttggtgatgtttgtattcaactcccagagttgaactttcctttggaaagagcagctatgaaactctttttctagaatctgcaagtggacgtttggagggctttgtggtttgtggtggaaaaggaaatatcttcacctaaatattagatagaagcattctcagaagcttctctgtgatgactgcattcaactcacggagttgaacactccttttgagagtgcagttttgaaactctctttctgtgggatctgcaaggggacatgtagacctctctgaagatttcgttggaaacggaatcatcttcacataaaaactatacagaagcagtctcagaatcttctttgtgatgtttgcattcaaatcccagagttgaactttcctttcaaagttcacgtttgaaacactctttttgcaggatctacaagtggatatttggaccactctgtgtccttcgttcgaaacgggtatatcttcacatgacatctagacagaagctttctcagaaaattctttgcgatgattgagttgaactcacagagctgaacattccttgcgatgtagcagtttagaaacacactttctgcagaatctgcaaatgcatatttggacctatctgaggaattcgttggaaacgggataatttcagctgactaaacagaagcattctcagaaccttcttcgtgatgtctgcattcaactcacagtgtggaacctttctttgatagttcaggtttgaaacactctttttgtagaaactgcaaggggataattgcactctttgaggagtacccgtagtaaaggaaataacttcctataaaaagaagacagaagcattctcagaaccctcttcgtgatgtttgcattcaactcacagtgctgaacctttctttgatagttcagctttgaaacactctttttgtagaaactgcaagtggatatttggtcctctctgaggatttcgttggaaacgggataaactgcacagaactaaacagaagcattctcagaaccttcttcgtgatgtttgcattcaactcacagtgttgaacctttctttgatagttcaggtttgaaacggtctttctgtagaaactgcaagtagatatttggaccgctctgaggatttcgttggaaacgggataacccgcacagaactaaaacagaagcattcacagaaaactcttggtgacgactgagtttaactcacagagctgaacattcctttggatggagcagtttcgaaacacactatttgtagaatgtgcaagtggatatttaggcctctctgaggatttcgttggaaacgggataaaccgcacagaactaaacagaagcattctcagaaactactttgtgatgattgcattcaagtcacagagttgaacattccctttgacagagcagtttggaaactctctttgtgtagaatctgcaagtggagatatggaccgctttgaggcctatggtagtaaaggaaatagcttcatataaaagctagacagtagcattctcagaaacttctttgtgatgcttgcattcaactcacagagttgaactttcctttcgagagagaagctttgaaacactctttttccagaatctgcaagtggacatttggagggctttgaggcctgtggtggaaaaggaattatcttcccgtaaaagctagatagaagcattgtcagaaacttctttgtgatgattgcattcaactcacagagttgaaggttccttttcaaagagcagtttccaatcactctttgtgtggaatctgcaagtggatatttggacctattttgaagatttcgttggaaacgggagaatcttcacaggaaagctaaacagaagcattctcagaaacttctctgtgatgtttgtgttcaactcccagagtttcacattgcttttcatagagtagttctgaaacatgcttttcgtagtgtctacaagtggacatttggagcgctttcaggcctgtggtggaaaacgaattatggtcacataaaaactggagagaagacttctcagaaacttctctgtgatgattgcattcaactcacagagttgaaccctcctatggatagagcagtgttgaaactctctttttgtggaatctgcaagtggatatgtggacctctccgaagatgtctttggaaacgggaatatcttcacataaaaactaaacagaagcattctcagaaacttcttggtgatgtttgcattcaaatcccagagttgaaccttcctttgatagttcaggtttgaaacactctttttgtaggatctgcaagtggatatttggaccactctgtggccttcgttcgaaacgggtatatcttcgcataaaatctagacagaagcattctcagaaaatactttgtgatgattgagtttaactcacagagctgaacattcctttggatggagcaggtttgagacacaccttttgtagaatctacaagtggatacttggacctctctgaggatttcgttggaaacgggataactgcacctaactaaacggaagcattctcagaaactgctttgtgatgattgcattcacctcacagagttgaacattcctattgatagagcagtttggaaacactcttgttgtggaatgtgcaagtggagatttggagcgctttgaggcctatggtagtaaagggaatagcttcatagaaaaactagacagatgcattctcaggaactttttggtgatgtttgtattcaactcccagagttgaactttcctttggaaagagcagctatgaaacactctttttctagaatctgcaagtggacgtttggagggctttgtggtttgtggtggaaaaggaaatatcttcacctaaatactagatagaaagcattctcagtaagcttctctgtgatgactgcattcaactcacggagttgaacactccttttgagagcgcagttttgaaactctctttctgtggcatctgcaaggggacatgtagacctctttgaagatttcgttggaaacggaatcatcttcacataaaaactatacagaagcagtctcagaatcttctttgtgatgtttgcattcaaatcccagagttgaactttcctttcaaagttcacgtttgaaacactctttttgcaggatctacaagtggatatttggaccactctgtgtccttcgttcgaaacgggtatatcttcacatgacatctagacagaagctttctcagaaaattctttgggatgattgaggggaactcacagagctgaacattccttgcgatgtagcagtttagaaacacactttctgcagaatctgcaagtgcatatttggacctctctgaggaattcgttggaaacgggataatttcagctgactaaacagaagcattctcagaaccttcttcgtgatgtctgcattcaactcacagtgtggaacctttctttgatagttcaggtttgaaacactctttttgtagaaactgcaaggggataattgcacttctttgaggcctaccgtagtaaaggaaataacttcctatagaaagaagacagaagcattctcagaaccctcttcgtgatgtttgcattcaactcacagtgctgaacctttctttgatagttcagctttgaaacactcttcttgtagaaactgcaagtggatatttggtcctctctgaggatttcgttggaaacgggataaaccgcacagaactaaacagaagaattctcagagccctcttcgtgatgtttgcattcaactcacagtgctgaacctttctttgatagtgcagctttgaaacactctttttgtagaaactgcaagtggatgtttggtcctctctgaggatttcgttggaaacgggataaaccgcacagaactaaaacagaagcattgtcagaaacttctttgtgatgattgcattcaactcacagagttgaaggttccttttcaaacagcagtttccaatcactctttctgtggaatctgcaagtggatatttgggcctctctgaggatttcgttggaaacgggataaaacgcacagaactaaaacagaagcattctcagaaacttctctgtgatgtttgtgttcaactcccagagtttcacgttgcttttcatagagtagttctgaaacatgcttttcgtagtgtctgcaagtggacatttggagcgctttcaggcctgtggtggaaaacgaattatggtcacataaaaactggagagaagccttctcagaaacttctctgtgatgattgcattcaactcacagagttgaaccctcctatggatagagcagtgttgaaactctctttttgtggaacctgcaagtggatatgtggacctctccgaagatgtctttggaaacgggaatatcttcacataaaaactaaacagaagcattctcagaaacttcttggtgatgtttgcattcaaatcccagagttgaaccttcctttgatagttcaggtttgaaacactctttctgtaggatctgcaagtggctatttggaccactctgtggccttcgttcgaaacgggtatatcttcgcataaaatctagacagaagcattctcagaaaatactttgtgatgattgagtttaaatcacagagctgaccattcctttggatggagcaggtttgagacacactttttgtagaatctacaagtggatatttggacctctctgaggatttcgttggaaacgggataactgcacctaactaaacggaagcattctcagaaactgctttgtgatgattgcattcacctcacagagttgaacattcctattgatagagcagtttggaaacactcttgttgtggaatgtgcaagtggagatttggagcgctttgaggcctgtggtagtaaagggaatagcttcatagaaaaactagacagatgcattctcaggaactttttggtgatgtttgtattcaactcccagagttgaactttcctttggaaagagcagctatgaaacactctttttctagaatctgcaagtggacgtttggagggctttgtggtttgtggtggaaaaggaaatatcttcacctaaatactagatagaagcattctcagaagcttctctgtgatgactgcattcaactcacggagttgaacactccttttgagagcgcagttttgaaactctctttctgtggcatctgcaaggggacatgtagacctctttgaagatttcgttggaaacggaatcatcttcacataaaaactatacagaagcagtctcagaatcttctttgtgatgtttgcattcaaatcccagagttgaactttcctttcaaagttcacgtttgaaacactctttttgcaggatctacaagtggatatttggaccactctgtgtccttcgttcgaaacgggtatatcttcacacgacatctagacagaagctttctcagaaaattctttgggatgattgagtggaactcacagagctgaacattccttgcgatgtagcagtttagaaacacactttctgcagaatctgcaagtgcatatttggacctctctgaggaattcgttggaaacgggataatttcagctgactaaacagaagcattctcagaaccttcttcgtgatgtctgcattcaactcacagtgtggaacctttctttgatagttcaggtttgaaacactctttttgtagaaactgcaaggggataattgcacttctttgaggcctaccgtagtaaaggaaataacttcctatagaaagaagacagaagcattctcagaaccctcttcgtgatgtttgcattcaactcacagtgctgaacctttctttgatagttcagctttgaaacactcttcttgtagaaactgcaagtggatatttggtcctctctgaggatttcgttggaaacgggataaaccgcacagaactaaacagaagcattcacagaaaactcttggtgacgactgagtttaacacacagagctgaatattcctttggatggagcagtttctaaacacactatttgtaggatcggcaagtggatatgtgggcctctctgaggatttcgttggaaacgggataaaccgcacagaactaaaacagaagcattctcagaaactactttgtgatgattgcattcaagtcacagagctgaacattccctttgacagagcagtttggaaactctctttgtgtagaatctgcaagtggagatatggaaggctttgaggactatgttagtaaaggaaatagcttcatataaaagctagaccttagcattctcagaaacttctttgtgatgcttgcattcaactcacagagttgaactttcctttcgagagagaagctttgaaacactctttttccagaatctgcaagtggacattttgagggctttgaggcctgtggtggaaaaggaattatcttcccgtaaaagctagatagaagcattgtcagaaacttctttgtgatgattgcattcaactcacagagttgaaggttccttttcaaacagcagtttccaatcactctttctgtggaatctgcaagtggatatttgggcctctctgaggatttcgttggaaacgggataaaacgcacagaactaaaacagaagcattctcagaaacttctctgtgatgtttgtgttcaactcccagagtttcacgttgcttttcatagagtagttctgaaacatgcttttcgtagtgtctgcaagtggacatttggagcgctttcaggcctgtggtggaaaacgaattatggtcacataaaaactggagagaagccttctcagaaacttctctgtgatgattgcattcaactcacagagttgaaccctcctatggatagagcagtgttgaaactctctttttgtggaatctgcaagtggatatgtggacctctccgaagatgtctttggaaacgggaatatcttcacataaaaactaaacagaagcattctcagaaacttcttggtgatgtttgcattcaaatcccagagttgaaccttcctttgatagttcaggtttgaaacactctttctgtaggatctgcaagtggctatttggaccactctgtggccttcgttcgaaacgggtatatcttcgcataaaatctagacagaagcattctcagaaaatactttgtgatgattgagtttaactcacagagctgaacattcctttggatggagcaggtttgagacacaccttttgtagaatctacaagtggatatttggacctctctgaggatttcgttggaaacgggataactgcacctaactaaacggaaagcattctcagaaactgctttgtgatgattgcattcacctcacagagttgaacattcctattgatagagcagtttggaaacactcttgttgtggaatgtgcaagtggagatttggagcgctttgaggcctatggtagtaaagggaatagcttcatagaaaaactagacagtgcattctcaggaactttttggtgatgtttgtattcaactcccagagttgaactttcctttggaaagagcagctatgaaacactctttttctagaatctgcaagtggacgtttggagggctttgtggtttgtggtggaaaaggaaatatcttcacctaaatactagatagaagcattctcagaagctcctctgtgatgactgcattcaactcacggagttgaacactccttttgagagcgcagttttgaaactctctttctgtggcatctgcaaggggacatgtagacctctttgaagatttcgttggaaacggaatcatcttcacataaaaactatacagaagcagtctcagaatcttctttgtgatgtttgcattcaaatcccagagttgaactttcctttcaaagttcacgtttgaaacactctttttgcaggatctacaagtggatatttggaccactctgtgtccttcgttcgaaacgggtataacttcacacgacatctagacagaaggtttctcagaaaattctttgggatgattgagtggaactcacagagctgaacattccttgcgatgtagcagtttagaaacacactttctgcagaatctgcaagtgcatatttggacctctctgaggaattcgttggaaacgggataatttcagctgactaaacagaagcattctcagaaccttcttcgtgatgtctgcattcaactcacagtgtggaacctttctttgatagttcaggtttgaaacactctttttgtagaaactgcaaggggataattgcacttctttgaggcctaccgtagtaaaggaaataacttcctatagaaagaagacagaagcattctcagaaccctcttcgtgatgtttgcattcaactcacagtgctgaacctttctttgatagttcagctttgaaacactcttcttgtagaaactgcaagtggatatttggtcctctctgaggatttcgttggaaacgggataaaccgcacagaactaaacagaagcattctcagaaccttcttcgtgatgtttgcattcaactcacactgttgaacctttctttgatagttcaggtttgaaacggtctttctgtagaaactgcaagtagatatttggacctctctgaggatttcgttggaaacgggataaaccgcacagaactaaaacagaagcattcacagaaaactcttggtgacgactgagtttaactcacagagctgaacattcctttggatggagcagtttcgaaacacactatttgtagaatgtgcaagtggatatttgggcctctctgaggatttcgttggaaacgggataaaccgcacagaactaaacagaagcattctcagaaactactttgtgatgattgcattcaagtcacagagttgaacattccctttgacagagcagtttggaaactctctttgtgtagaatctgcaagtggagatatggaccgctttgaggcctatggtagtaaaggaaatagcttcatataaaagctagacagtagcattctcagaaacttctttgtgatgcttgcattcaactcacagagttgaactttcctttcgagagagaagctttgaaacactctttttccagaatctgcaagtggacatttggagggctttgaggcctgtggtggaaaaggaattaacttcccgtaaaagctagatagaagcattgtcagaaacttctttgtgatgattgcattcaactcacggagatgaaggttcctttacaaacagcagtttccaaacactctttctgtggaatttgcaagtggatatttggacctctttgaagatttcgttggaaacgggagaatcttcacagaaaagctaaacagaagcattctcagaaactcctttgtgatgtttgttttcaactcacagagtttaacattgctttccatagagcagttttgaaacattcttttcttagtgtcggcaagtggacatttggagcgctttcaggcctgtggtggaaaacgaattatcgtcacataaaaactagagagaagccttctcagaaacttctctgtgatgattgcattcaagtcacggagttgaacactccttttgatagagcatttttgaaactctctttttgtagaatctgcaagtggatatgtggacctctttgaagatttctttggaaacgggaatatcttcacataaaaactaaacagaagcagtctcagaaacttctttgtgatgtttgcattcaaatcccagacttgaaccttcctttgatagttcaggtttgaaaccctctttttgtaggatctgccagtggatatttggaccactttgtggccttcgttcgaaacgggtataccttcacataaaatctagacagaagcattctcagaaaatactttgtgatgattgagtttaaatcacagagctgaacagtcctttggatggagcaggtttgagacacactttttgtagaatctacaagtggatatttggacctctctgaggatttcgttggaaacgggataactgcacctaactaaacggaagcattctcagaaactgctttgtgatgattgcattcacctcacagagttgaacattcctattgatagagcagtttggaaacactcttgttgtggaatgtgcaagtggagatttggagcgctttgaggcctatggtagtaaatggaatagcttcatagaaaaactagacagatgcattctcaggaactttttggtgatgtttgtattcaactcccagagttgaactttcctttggaaagagcagctatgaaacactctttttctagaatctgcaagtggacgtttggagggctttgtggtttgtggtggaaaaggaaatatcttcacctaaatactagatagaagcatcctcagaagcttctctgtgatgactgcattcaactcacggagttgaacactccttttgagagcgcagttttgaaactctctttctgtggcatctgcaaggggacatgtagacctctttgaagatttcgttggaaacggaatcatcttcacataaaaactatacagaagcagtctcagaatcttctttgtgatgtttgcattcaaatccccgagttgaactttcctttcaaagttcacgtttgaaacactctttttgcaggttctacaagtggatatttggaccactctgtgtccttcgttcgaaacgggtatatcttcacatgacatctagacagaagctttctcagaaaattctttgggatgattgagttgaactcacagagctgagcattccttgcgatgtagcagtttagaaacacactttctgcagaatctgcaagtgcatatttggacctctgtgaggaattcgttggaaacgggataatttcagctgactaaacagaagcattctcagaaccttcttcgtgatgtctgcattcaactcacagtgtggaacctttctttgatagttcaggtttgaaacactctttttgtagaaactgcaaggggatcattgcactctttgaggagtaccgtagtaaaggaaataacttcctataaaaagaagacagaagcattctcagaaccctcttcgtgatgtttgcattcaactcacagtgctgaacctttctttgatagttcagctttgaaactctccttttgtagaaactgcaaatggatatttggtcctctctgaggatttcgttggaaaagggataaaacgcacagaactaaacagaagcattcacagaaaactcttggtgacgactgagtttaactcacagagctgaacattcctttggatggagcagtttcaaaacacactatttgtagaatgtgcaagtggatatgtgggcctctctgaggatttcgttggaaacgggataaaccgcacagaactaaaacagaagcattctcagaaactactttgtgatgattgcattcaagtcacagagttgaacattccctttgacagagcagtttggaaactctctttgtgtagaatctgcaagtggagatatggaccgctttgaggcctatggtagtaaaggaaatagcttcatataaaagctagacagtagcattctcagaaacttctttgtgatgcttgcattcaactcacagagttgaactatcctttcgagagagaagctttgaaatactctttttccagaatctgcaagtggacatttggagggctttgaggcctgtggtggaaaaggaattatcttcctgtaaaagctagatagaagcattgtcagaaacttctttgtgatgattgcattcaactcacagagttgaaggttccttttcaaagagcagtttccaatcactctttctgtggaatctgcaagtggatatttggacctctttgaagatttcgttggaaacgggagaatcttcacagaaaagctaaacagaagcattctcagaaacttctctgtgatgtttgtgttcaacttccagagtttcacattgcttttcatagagtagttctgaaacatgcttttcgtagtgtctgcaagtggacatttggagcgctttcaggcctgtggtggaaaacgaattatggtcacataaaaactggagagaagccttctcagaaacttctctgtgatgattgcattcaactcacagagttgaaccctcctatggatagagcagtgttgaaactctctttttgtggaatctgcaagtggatatgtggacctctccgaagatgtctttggaaacgggaatatcttcacataaaaactaaacagaaggattctcagaaacttcttggtgatgtttgcattcaaatcccagagttgaaccttcctttgatagttcaggtttgaaacactctttttgtaggatctgcaagtggctatttggaccactcctgtggcattcgttcaaaacgggtatatcttcgcataaaatctagacagaagcattctcagaaaatactttgtgatgattgagttaaaatcacagagctgaacattcctttggatggagcaggtttgagacacactttttgtagaatctacaagtggatatttggacctctctgaggatttcgttggaaacgggataactgcacctaactaaacggaagcattctcagaaactgctttgtgatgattgcattcacctcacagagttgaacattcctattgatagagcagtttggaaacactcttgttgtggaatgtgcaagtggagatttggagcgctttgaggtctatggtagtaaagggaatagcttcatagaaaaactagacagatgcattctcaggaactttttggtgatgtttgtattcaactcccagagttgaactttcctttggaaagagcagctatgaaacactctttttctagaatctgcaagtggacgtttggagggctttgtggtttgtggtggaaaaggaaatatcttcacctaaatactagatagaagcattctcagaagcttctctgtgatgactgcattcaactcacggagtctgaacactccttttgagagcgcagttttgaaactctctttctgtggcatctgcaaggggacatgtagacctctttgaagatttcgttggaaacggaatcatcttcacataaaaactatacagaagcagtctcagaatcttctttgtgatgtttgcattcaaatcccagagttgaactttcctctcaaagttcacgtttgaaacactctttttgcaggatctacaagtggatatttggaccactctgtgtccttcgttcgaaacgggtatatcttcacacgacatctagacagaagctttctcagaaaattctttgggatgattgagtggaactcacagagctgaacattccttgcgatgtagcagtttagaaacacactttctgcagaatctgcaagtgcatatttggacctctctgaggaattcgttggaaacgggataatttcagctgactaaacagaagcattctcagaaccttcttcgtgatgtctgcattcaactcacagtgtggaacctttctttgatagttcaggtttgaaacactctttttgtagaaactgcaaggggataattgcacttctttgaggcctaccgtagtaaaggaaataacttcctatagaaagaagacagaagcattctcagaaccctcttcgtgatgtttgcattcaactcacagtgctgaacctttctttgatagttcagctttgaaacactcttcttgtagaaactgcaagtggatatttggtcctctctgaggatttcgttggaaacgggataaaccgcacagaactaaacagaagcattctcagagccctcttcgtgatgtttgcattcaactcacagtgctgaacctttctttgatagtgcagctttgaaacactctttttgtagaaactgcaagtggatgtttggtcctctctgaggatttcgttggaaacgggataaaccgcacagaactaaaacagaagcattgtcagaaacttctttgtgatgattgcattcaactcacagagttgaaggttccttttcaaacagcagtttccaatcactctttctgtggaatctgcaagtggatatttgggcctctctgaggatttcgttggaaacgggataaaacgcacagaactaaaacagaagcattctcagaaacttctctgtgatgtttgtgttcaactcccagagtttcacgttgcttttcatagagtagttctgaaacatgcttttcgtagtgtctgcaagtggacatttggagcgctttcaggcctgtggtggaaaacgaattatggtcacataaaaactggagagaagccttctcagaaacttctctgtgatgattgcattcaactcacagagttgaaccctcctatggatagagcagtgttgaaactctctttttgtggaatctgcaagtggatatgtggacctctccgaagatgtctttggaaacgggaatatcttcacataaaaactaaacagaagcattctcagaaacttcttggtgatgtttgcattcaaatcccagagttgaaccttcctttgatagttcaggtttgaaacactctttctgtaggatctgcaagtggctatttggaccactctgtggccttcgttcgaaacgggtatatcttcacataaaatctagacagaagcattctcagaaaatactttgtgatgattgagtttaaatcacagagctgaccattcctttggatggagcaggtttgagacacactttttgtagaatctacaagtggatatttggacctctctgaggatttcgttggaaacgggataactgcacctaactaaacggaagcattctcagaaactgctttgtgatgattgcattcacctcacagagttgaacattcctattgatagagcagtttggaaacactcttgttgtggaatgtgcaagtggagatttggagcgctttgaggcctgtggtagtaaagggaatagcttcatagaaaaactagacagatgcattctcaggaactttttggtgatgtttgtattcaactcccagagttgaactttcctttggaaagagcagctatgaaacactctttttctagaatctgcaagtggacgtttggagggctttgtggtttgtggtggaaaaggaaatatcttcacctaaatactagatagaagcattctcagaagcttctctgtgatgactgcattcaactcacggagttgaacactccttttgagagcgcagttttgaaactctctttctgtggcatctgcaaggggacatgtagacctctttgaagatttcgttggaaacggaatcatcttcacataaaaactatacagaagcagtctcagaatcttctttgtgatgtttgcattcaaatcccagagttgaactttcctttcaaagttcacgtttgaaacactctttttgcaggatctacaagtggatatttggaccactctgtgtccttcgttcgaaacgggtatatcttcacacgacatctagacagaagctttctcagaaaattctttgggatgattgagtggaactcacagagctgaacattccttgcgatgtagcagtttagaaacacactttctgcagaatctgcaagtgcatatttggacctctctgaggaattcgttggaaacgggataatttcagctgactaaacagaagcattctcagaaccttcttcgtgatgtctgcattcaactcacagtgtggaacctttctttgatagttcaggtttgaaacactctttttgtagaaactgcaaggggataattgcacttctttgaggcctaccgtagtaaaggaaataacttcctatagaaagaagacagaagcattctcagaaccctcttcgtgatgtttgcattcaactcacagtgctgaacctttctttgatagttcagctttgaaacactcttcttgtagaaactgcaagtggatatttggtcctctctgaggatttcgttggaaacgggataaaccgcacagaactaaacagaagaattctcagagccctcttcgtgatgtttgcattcaactcacagtgctgaacctttctttgatagtgcagctttgaaacactctttttgtagaaactgcaagtggatgtttggtcctctctgaggatttcgttggaaacgggataaaccgcacagaactaaaacagaagcattgtcagaaacttctttgtgatgattgcattcaactcacagagttgaaggttccttttcaaacagcagtttccaatcactctttctgtggaatctgcaagtggatatttgggcctctctgaggatttcgttggaaacgggataaaacgcacagaactaaaacagaagcattctcagaaacttctctgtgatgtttgtgttcaactcccagagtttcacgttgcttttcatagagtagttctgaaacatgcttttcgtagtgtctgcaagtggacatttggagcgctttcaggcctgtggtggaaaacgaattatggtcacataaaaactggagagaagccttctcagaaacttctctgtgatgattgcattcaactcacagagttgaaccctcctatggatagagcagtgttgaaactctctttttgtggaatctgcaagtggatatgtggacctctccgaagatgtctttggaaacgggaatatcttcacataaaaactaaacagaagcattctcagaaacttcttggtgatgtttgcattcaaatcccagagttgaaccttcctttgacagttcaggtttgaaacactctttttgtaggatctgcaagtggatatttggaccactctgtggccttcgttcgaaacgggtacatcttcgcataaaatctagacagaagcattctcagaaaatactttgtgatgattgagttgaactcacagagctgaacattcctttggatggagcaggtttgagacacactttttgtagaatctacaagtggatatttggacctctctgaggatttcgttggaaacgggataactgcacctaactaaacggaagcattctcagaaactgctttgtgatgattgcattcacctcacagagttgaacattcctattgatagagcaggttggaaacactcttgttgtggaatgtgcaagtggagatttggagcgctttgaggcctatggtagtaaagggaatagcttcatagaaaaattagacagatgcattctcaggaactttttggtgatgtttgtattcaactcccagagttgaactttcctttggaaagagcagctatgaaacactctttttctagaatctgcaagtggacgtttggagggctttgtggtttgtggtggaaaaggaaatatcttcacctgaatactagatagaagcattctcagaagcttctctgtgatgactgcattcaactcacggagttgaacactccttttgagagcgcagttttgaaactctctttctgtggcatctgcaaggggacatgtagacctctttgaagatttcgttggaaacggaatcatcttcacataaaaactatacagaagcagtctcagaatcttctttgtgatgtttgcattcgaatcccagagttgaaccttcgtttgaaagttcaggtttgaaaccctctttttgcaggatctacaagtggatatttggaccactctgtggccttcgttcgaaacgggtatatcttcacatgacatctagacagaagctttctcagaaaattctttgggatgattgagtggaactcaacagagctgaacattccttgcgatgtagcagtttagaaacacactttctgcagaatctgcaagtgcatatttggacctctctgaggaattcgttggaaacgggataatttcagctgactaaacagaagcattctcagaaccttcttcgtgatgtctgcattcaactcacagtgtggaacctttctttgatagttcaggtttgaaacactctttttgtagaaactgcaaggggataattgcacttctttgaggcctaccgtagtaaaggaaataacttcctatagaaagaagacagaagcattctcagaaccctcttcgtgatgtttgcattcaactcacagtgctgaacctttctttgatagttcagctttgaaacactcttcttgtagaaactgcaagtggatatttggtcctctctgaggatttcgttggaaacgggataaaccgcacagaactaaacagaagaattctcagagccctcttcgtgatgtttgcattcaactcacagtgctgaacctttctttgatagtgcagctttgaaacactctttttgtagaaactgcaagtggatgtttggtcctctctgaggatttcgttggaaacgggataaaccgcacagaactaaaacagaagcattgtcagaaacttctttgtgatgattgcattcaactcacagagttgaaggttccttttcaaacagcagtttccaatcactctttctgtggaatctgcaagtggatatttgggcctctctgaggatttcgttggaaacgggataaaacgcacagaactaaaacagaagcattctcagaaacttctctgtgatgtttgtgttcaactcccagagtttcacgttgcttttcatagagtagttctgaaacatgcttttcgtagtgtctgcaagtggacatttggagcgctttcaggcctgtggtggaaaacgaattatggtcacataaaaactggagagaagccttctcagaaacttctctgtgatgattgcattcaactcacagagttgaaccctcctatggatagagcagtgttgaaactctctttttgtggaatctgcaagtggatatgtggacctctccgaagatgtctttggaaacgggaatatcttcacataaaaactaaacagaagcattctcagaaacttcttggtgatgtttgcattcaaatcccagagttgaaccttcctttgatagttcaggtttgaaacactctttttgtaggatctgcaagtggatatttggaccactctgtggccttcgttcgaaacgggtatatcttcgcataaaatctagacagaagcattctcagaaaatactttgtgatgattgagtttaactcacagagctgaacattcctttggatggagcaggtttgagacacactttttgtagaatctacaagtggatatttggacctctctgaggatttcgttggaaacgcgataactgcacctaactaaacggaagcattctcagaaactgctttgtgatgattgcattcacctcacagagttgaacattcctattgatagagcagtttggaaacactcttgttgtggaatgtgcaagtggagatttggagcgctttgaggcctatggtagtaaagggaatagcttcatagaaaaacaaggcagatgcattctcaggaactttttggtgatgtttgtattcaactcccagagttgaactttcctttggaaagagcagctatgaaacactctttttctagaatctgcaagtggacgtttggagggctttgtggtttgtggtggaaaaggaaatatcttcacctaaatactagatagaagcattctcagaagcttctctgtgatgactgcattcaactcacggagttgaacactccttttgagagcgtagttttgaaactctctttctgtggcatctgcaaggggacatgtagacctctttgaagatttcgttggaaacggaatcatcttcacataaaaactatacagaagcagtctcagaatcttctttgtgatgtttgcattcaaatccctgagttgaactttcctttccaagttcacgtttgaaacactctttttgcaggatctacaagtggatatttggaccactctgtgtccttcgttcgaaacgggtatatcttcacatgacatctagacagaagctttctcagaaaattctttgggatgattgagtggagcaaacagagctgaacactccttgcgatgtagcagtttagaaacaccctttctgcagaatctgcaagtgcatatgtggacctcctctgaggaattcgttggaaacgggataatttcagctgactaaacagaagcattctcagaaccttcttcgtgatgtctgcattcaactcacagtgtggaacctttctttgatagttcaggtttgaaacactctttttgtagaaactgcaaggggatcattgcacttctttgaggcctaccgtagtaaaggagataacttgctataaaaagaagacagaagcattctcagaaccctcttggtgatgtttgcattcaactctcggtgctgaacctttctttgatagttcagctttgaaacactctttttgtagaaactgcaagtggatatttggtcctctctgaggatttcgttggaaacgggataaaccgcacagaactaaacagaagcattctcagaactttcttcgtgatgtttgcattcaactcacagtgttgaacctttctttgatagttcaggtttgaaacggtctttctgtagaaactgcaagtagatatttggacctctctgaggatttcgttggaaacgggataaaccgcacagaactaaaacagaagcattcacagaaaactcttggtgacgactgagtttaactcacagagctgaacattcctttggatggagcagtttcgaaacacactatttgtagaatgtgcaagtggatatgtgggcctctctgaggatttcgttggaaacgggataaaccgcacagaactaaacagaagcattctcagaaactactttgtgatgattgcattcaagtcacagagttgaacattccctttgacagagcagtttggaaactctctttgcgtagaatctgcaagtggagatatggaccgctttgaggcctatggtagtaaaggaaatagcttcatataaaagctagacagcagcattctcagaaacttctttgtgatgcttccattcaactcacagagttgaactttcctttcgagagagaagctttgaaacactctttttccagaatctgcaagtggatatttggagggctttgaggcctgtggtggaaaaggaattatcttcccgtaaaagctagatagaagcattgtcagaaacttctttgtgatgattgccttcaactcacagagttgaaggttccttttcaaacagcagtttccaaacactctttctgtggaatctgcaagtggatgtttggacctctttgaagatttcgttggaaacgggagaatcttcacagaaaagctaaacagaagcattctcagaaacttctctgtgatgtttgtgttcaactcccagagtttcacattgcttttcatagagtagttctgaaacatgcttttcgtagtgtctgcaagtggacatttggagcgctttcaggcctgtggtggaaaacgaattatggtcacataaaaactggagagaagccttctcagaaacttctctgtgatgattgcattcaactcacagagttgaaccctcctatggatagagcagtgttgaaactctctttttgtggaatctgcaagcggatatgtggacctctccgaagatgtctttggaaacgggaatatcttcacataaaaactaaacagaagcattctcagaaacttcttggtgatgtttgcattcaaatcccagagttgaaccttcctttgatagttcaggtttgaaacactctttttgtaggatctgcaagtggatatttggaccactctgtggccttcgttcgaaacgggtacatcttcgcataaaatctagacagaagcattctcagaaaatactttgtgatgattgagttgaactcacagagctgaacattcctttggatggagcaggtttgagacacactttttgtagaatctacaagtggatatttggacctctctgaggatttcgttggaaacgggataactgcacctaactaaacggaagcattctcagaaactgctttgtgatgattgcattcacctcacagagttgaacattcctattgatagagcagtttggaaacactcttgttgtggaatgtgcaagtggagatttggagcgctttgaggcctatggtagtaaagggaatagcttcatagaaaaactagacagatgcgttctcaggaactttttggtgatgtttgtattcaactcccagagttgaactttcctttggaaagagcagctatgaaacactgtttttctagaatctgcaagtggacgtttggagggctttgtggtttgtggtggaaaaggaaatatcttcacctaaatactagatagaagcattctcagaagcttctctgtgatgactgcattcaactcacggagttgaacactccttttgagagcgcagttttgaaactctctttctgtggcatctgcaaggggacatgtagacctctctgaagatttcgttggaaacggaatcatcttcacataaaaactatacagaaacagtctcagaatcttctttgtgatgtttgcattcaaatcccagagttgaactttcctttcaaagttcacgtttgaaacactctttttgcaggatctacaagtggatatttggaccactctgtgtccttcgttcaaaacgggtatatcttcacatgacatctagacagaagctttctcagaaaattctttgggatgattgagttgaactcacagagctgaacattccttgcgatgtagcagtttagaaacacactttctgcagaatctgcaagtgcatatttggacctctctgaggaattcgttggaaacgggataatttcagctgactaaaccgaagcattctcagaaccttcttcgtgatgtctgcattcaactcacagtgtggaatctttctttggtagttcaggtttgaaacactctttttgtagaaactgcaaggggataattgcacttctttgaggcctaccgtagtaaaggaaataacttcgtataaaaagaagacagaagcattctcagaaccctcttcgtgatgtttgcattcaactcacagtgttgaacctttctttgatagttcaggtttgaaacggtttttctgtagaaactgcaagtagatatttggacctctctgaggatttcgttggaaacgggataaaccgcacagaactaaacagaagcattctcagaaccctcttcgtgatgtttgcattcaactcacagtactgaacctttctttgatagttcaggtttgaaacactctttttgtagaaactgcaagtggatatttgggcctctctgaggatttcgttggaaacgggataaaccgcacagaactaaacagaagcattctcagaaccttcttcgtgatgtttgcattcaactcacagtgctgaacctttctttgatagttcagctttgaaacactctttttgtagaaactgcaagtggatatttggacctctctgaggatttcattggaaacgggataaacagcacagaactaaaacagaagcattcacagaaaactcttggtgacgactgagtttaactcacagagctgaacatccctttggatggagcagtttcgaaacacactatttgtagaatgtgcaagtggatatttgggcctctctgaggatttcgttggaaacgggataaaccgcacagaactaaacagaagcattctcagaaactactttgtgatgattgcattcaagtcacagagttgaacattccctttgacagagcagtttggaaactctctttgtgtagaatctgcaagtggagatatggaccgctttgaggactatggtagtaaaggaaatagcttcatataaaagctagacagtagcattctcagaaacttctttgtgatgcttgcattcaactcacagagttgaactttcctttcgagagagaagctttgaaacactctttttccagaatctgcaagtggaaatttggagggctttgaggcctgtggtggaaaaggaattatcttcccgtaaaagctagatagaagcattgtcagaaacttctttgtgatgattgcattcaactcacagagttgaaggttccttttcaaacagcagtttccaaccactctttctgtggaatccgcaagtggatatttggacctctttgaagatttcgttggaaacgggagaatcttcacagaaaagctaaacagaagcattctcagaaacttctctgtgatgtttgtgttcaactcccagagtttcacattgcttttcatagagtagttctgaaacatgcttttcgtagtgtctgcaagtggacatttggagcgctttcaggcctgtggtggaaaacgaattatggtcacataaaaactggagagaagccttctcagaaacttctctgtgatgattgcattcaactcacagagttgaaccctcctatggatagagcagtgttgaaactctctttttgtggaatctgcaagtggatatgtggacctctccgaagatgtctttggaaacgggaatatcttcacataaaaactaaacagaagcattctcagaaacttcttggtgatgtttgcattcaaatcccagagttgaaccttcctttggtagttcaggtttgaaacactctttttgtaggatctgcaagtggctatttggaccactctgtggccttcgttcgaaacgggtatatcttcgcataaaatctagacagaagcattctcagaaaatactttgtgatgattgagtttaaatcacagagctgaccattcctttggatggagcaggtttgagacacactttttgtagaatctacaagtggatatttggacctctctgaggatttcgttggaaacgggataactgcacctaactaaacggaagcattctcagaaactgctttgtgatgattgcattcacctcacagagttgaacattcctattgatagagcagtttggaaacactcttgttgtggaatgtgcaagtggagatttggagcgctttgaggcctatggtagtaaagggaatagcttcatagaaaaactagacagatgcattctcaggaactttttggtgatgtttgtattcaactcccagagttgaactttcctttggaaagagcagctatgaaacactctttttctagaatctgcaagtggacgtttggagggctttgtggtttgtggtggaaaaggaaatatcttcacctaaatactagacagaagcattctcagaagcttctctgtgatgactgcattcaactcacggagttgaacactccttttgagagcgcagttttgaaactctctttctgtggcatctgcaaggggacatgtagacctctttgaagatttcgttggaaacggaatcatcttcacataaaaactatacagaagcagtctcagaatcttctttgtgatgtttgcattcaaatcccagagttgaactttcctttcaaagttcacgtttgaaacactctttttgcaggatctacaagtggatatttggaccactctgtgtccttcgttcgaaacgggtatatcttcacacgacatctagacagaagctttctcagaaaattctttgggatgattgagtggaactcacagagctgaacattccttgcgatgtagcagtttagaaacacactttctgcagaatctgcaagtgcatatttggacctctctgaggaattcgttggaaacgggataatttcagctgactaaacagaagcattctcagaaccttcttcgtgatgtctgcattcaactcacagtgtggaacctttctttgatagttcaggtttgaaacactctttttgtagaaactgcaaggggataattgcacttctttgaggcctaccgtagtaaaggaaataacttcctatagaaagaagacagaagcattctcagaaccctcttcgtgatgtttgcattcaactcacagtgctgaacctttctttgatagttcagctttgaaacactcttcttgtagaaactgcaagtggatatttggtcctctctgaggatttcgttggaaacgggataaaccgcacagaactaaacagaagaattctcagagccctcttcgtgatgtttgcattcaactcacagtgctgaacctttctttgatagtgcagctttgaaacactctttttgtagaaactgcaagtggatatttggtcctctctgaggatttcgttggaaacgggataaaccgcacagaactaaaacagaagcattcacagaaaactcttggtgacgactgagtttaactcacagagctgaacattcctttggatggagcagtttcgaaacacactatttgtagaatctgcaagtggatatttgggcctctctgaggatttcgttggaaacgggataaaacgcacaaaactaaaacagaagcattctcagaaactactttgtgatgattgcattcaagtcacagagttgaacattccctttgacagagcagtttggaaactctctttgtgtagaatctgcaagtggagatatggaccgctttgaggcctatggtagtaaaggaaatagcttcatataaaagctagacagtagcattctcagaaacttctttgtgatgcttgcattcaactcacagagttgaactttcctttcgagagagaagctttgaaacactctttttccagaatctgcaagtggacatttggagggctttgaggcctgtggtggaaaaggaattatcttcccgtaaaagctagatagaagcattgtcagaaacttctttgtgatgattgcattcaactcacagagttgaaggttccttttcaaagagcagtttccaatcactctttgtgtggaatctgcaagtggatatttggacctattttgaagatttcgttggaaacgggagaatcttcacaggaaagctaaacagaagcattctcagaaacttctctgtgatgtttgtgttcaactcccagagtttcacattgcttttcatagagtagttctgaaacatgcttttcgtagtgtctacaagtggacatttggagcgctttcaggcctgtggtggaaaacgaattatggtcacataaaaactggagagaagccttctcagaaacttctctgtgatgattgcattcaactcacagagttgaaccctcctatggatagagcagtgttgaaactctctttttgtggaatctgcaagtggatatgtggacctctccgaagatgtctttggaaacgggaatatcttcacataaaaactaaacagaagcattctcagaaacttcttggtgatgtttacattcaaatcccagagttgaaccttcctttgatagttcaggtttgaaacactctttttgtaggatctgcaagtggatatttggaccactctgtggccttcgttcgaaacgggtatatcttcgcataaaatctagacagaagcattctcagaaaatactttgtgatgattgagtttaactcacagagctgaacattcctttggatggagcaggtttgagacacactttttgtagaatctacaagtggatatttggacctctctgaggatttcgttggaaacgggataactgcacctaactaaacggaagcattctcagaaactgctttgtgatgattgcattcacctcacagagttgaacattcctattgatagagcagtttggaaacactcttgttgtggaatgtgcaagtggagatttggagcgctttgaggcctatggtagtaaagggaatagcttcatagaaaaactagacagatgcattctcaggaactttttggtgatgtttctattcaactcccagagttgaactttcctttggaaagagcagctatgaaacactctttttctagaatctgcaagtggacgtttggagggctttgtggtttgtggtggaaaaggaaatatcttcacctaaatactagagagaagcatcctcagaagcttctctgtgatgactgcattcaactcacggagttgaacactccttttgagagcgcagttttgaaactctctttctgtggcatctgcaaggggacatgtagacctctttgaagatttcgttggaaacggaatcatcttcacataaaaactacacaggaagcagtctcagaatcttctttgtgatgtttgcattcaaatccccgagttgaactttcctttcaaagttcacgtttgaaacactctttttgcaggatctacaagtggatatttggaccactctgtgtccttcgttcgaaacgggtatatcttcacatgacatctagacagaagctttctcagaaaattctttgggatgattgagttgaactcacagagctgagcattccttgcgatgtagcagtttagaaacacactttctgcagaatctgcaagtgcatatttggacctctgtgaggaattcgttggaaacgggataatttcagctgactaaacagaagcattctcagaaccttcttcgtgatgtctgcattcaactcacagtgtggaacctttctttgatagttcaggtttgaaacactctttttgtagaaactgcaaggggataattgcactctttgaggagtaccgtagtaaaggaaataacttcctataaaaagaagacagaagcattctcagaaccctcttcgtgatgtttgcattcaactcacagtgctgaacctttctttgatagttcagctttgaaacactctttttgtagaaactgcaagtggatatttggtcctctctgaggatttcgttggaaacgggataaaccgcacagaactaaacagaagcattctcagaaccttcttcgtgatgtttgcattcaactcaacagtgttgaacctttctttgatagttcaggtttgaaacggtctttctgtagaaactgcaagtagatatttggaccgctctgaggatttcgttggaaacgggataacccgcacagaactaaaacagaagcattcagaaaaaactcttggtgacgactgagtttaactcacagagctgaacattcctttggatggagcagtttcgaaacacactatttgtagaatgtgcaagtggatatttgggcctctctgaggatttcgttggaaacgggataaaccgcacagaactaaacagaagcattctcagaaactactttgtgatgattgcattcaagtcacagagttgaacattccctttgacagagcagtttggaaactctctttgtgtagaatctgcaagtggagatatggaccgctttgaggcctatggtagtaaaggaaatagcttcatataaaagctagacagtagcattctcagaaacttctttgtgatgcttgcattcaactcacagagttgaactttcctttcgagagagaagctttgaaacactctttttccagaatctgcaagtggacatttggagggctttgaggcctgtggtggaaaaggaattatcttcccgtaaaagctagatagaagcattgtcagaaacttctttgtgatgattgcattcaactcacagagttgaaggttccttttcaaagagcagtttccaatcactctttgtgtggaatctgcaagtggatatttggacctattttgaagatttcgttggaaacgggagaatcttcacaggaaagctaaacagaagcattctcagaaacttctctgtgatgtttgtgttcaactcccagagtttcacattgcttttcatagagtagttctgaaacatgcttttcgtagtgtctacaagtggacatttggagcgctttcaggcctgtggtggaaaacgaattatggtcacataaaaactggagagaagccttctcagaaacttctctgtgatgattgcattcaactcacagagttgaaccctcctatggatagagcagtgttgaaactctctttttgtggaatctgcaagtggatatgtggacctctccgaagatgtctttggaaacgggaatatcttcacataaaaacttaacagaagcattctcagaaacttcttggtgatgtttgcattcaaatcccagcagttgaaccttcctttgatagttcaggtttgaaacactctttttgtaggatctgcaagtggatatttggaccactctgtggccttcgttcgaaacgggtacatcttcgcataaaatctagacagaagcattctcagaaaatactttgtgatgattgagtttaactcacagagctgaacattcctttggatggagcaggtttgagacacactttttgtagaatctacaagtggatatttggacctctctgaggatttcgttggaaacgggataactgcacctaactaaacggaagcattctcagaaactgctttgtgatgattgcattcacctcacagagttgaacattcctattgatagagcagtttggaaacactcttgttgtggaatgtgcaagtggagatttggagcgctttgaggcctatggtagtaaagggaatagcttcatagaaaaactagacagatgcattctcaggaactttttggtgatgtttgtattcaactcccagagttgaactttcctttggaaagagcagctatgaaacactgtttttctagaatctgcaagtggacgtttggagggctttgtggtttgtggtggaaaaggaaatatcttcacctaaatactagatagaagcatcctcagaagcttctctgtgatgactgcattcaactcacggagttgaacactccttttgagagcgcagttttgaaactctctttctgtggcatctgcaaggggacatgtagacctctttgaagatttcgttggaaacggaatcatcttcacataaaaactatacagaagcagtctcagaatcttctttgtggtgtttgcattcaaatcccagagttgaactttcctttcaaagttcacgtttgaaacactctttttgcaggatctacaagtggatatttggaccactctgtgtccttcgttcgaaacgggtatatcttcacatgacatctagacagaagctttctcagaaaattctttgggatgattgagtggaactcacagagctgaacattccttgcgatgtagcagtttagaaacacactttctgcagaatctgcaagtgcatatttggacctctctgaggaattcgttggaaacgggataatttcagctgactaaacagaagcattctcagaaccttcttcgtgatgtctgcattcaactcacagtgtggaacctttctttgatagttcaggtttgaaacactctttttgtagaaactgcaaggggataattgcacttctttgaggcctaccgtagtaaaggaaataacttcctatagaaagaagacagaagcattctcagaaccctcttcgtgatgtttgcattcaactcacagtgctgaacctttctttgatagttcagctttgaaacactcttcttgtagaaactgcaagtggatatttggtcctctctgaggatttcgttggaaacgggataaaccgcacagaactaaacagaagaattctcagagccctcttcgtgatgtttgcattcaactcacagtgctgaacctttctttgatagtgcagctttgaaacactctttttgtagaaactgcaagtggatgtttggtcctctctgaggatttcgttggaaacgggataaaccgcacagaactaaaacagaagcattgtcagaaacttctttgtgatgattgcattcaactcacagagttgaaggttccttttcaaacagcagtttccaatcactctttctgtggaatctgcaagtggatatttgggcctctctgaggatttcgttggaaacgggataaaacgcacagaactaaaacagaagcattctcagaaacttctctgtgatgtttgtgttcaactcccagagtttcacgttgcttttcatagagtagttctgaaacatgcttttcgtagtgtctgcaagtggacatttggagcgctttcaggcctgtggtggaaaacgaattatggtcacataaaaactggagagaagccttctcagaaacttctctgtgatgattgcattcaactcacagagttgaaccctcctatggatagagcagtgttgaaactctctttttgtggaatctgcaagtggatatgtggacctctccgaagatgtctttggaaacgggaatatcttcacataaaaactaaacagaagcattctcagaaacttcttggtgatgtttgcattcaaatcccagagttgaaccttcctttgatagttcaggtttgaaacactctttctgtaggatctgcaagtggctatttggaccactctgtggccttcgttcgaaacgggtatatcttcgcataaaatctagacagaagcattctcagaaaatactttgtgatgattgagtttaaatcacagagctgaccattcctttggatggagcaggtttgagacacactttttgtagaatctacaagtggatatttggacctctctgaggatttcgttggaaacgggataactgcacctaactaaacggaagcattctcagaaactgctttgtgatgattgcattcacctcacagagttgaacattcctattgatagagcagtttggaaacactcttgttgtggaatgtgcaagtggagatttggagcgctttgaggcctatggtagtaaagggaatagcttcatagaaaaactagacagatgcattctcaggaactttttggtgatgtttgtattcaactcccagagttgaactttcctttggaaagagcagctatgaaacactctttttctagaatctgcaagtggacgtttggagggctttgtggtttgtggtggaaaaggaaatatcttcacctaaatactagatagaagcattctcagaagcttctctgtgatgactgcattcaactcacggagttgaacactccttttgagagcgcagttttgaaactctctttctgtggcatctgcaaggggacatgtagacctctttgaagatttcgttggaaacggaatcatcttcacataaaaactatacagaagcagtctcagaatcttctttgtgatgtttgcattcaaatcccagagttgaactttcctttcaaagttcacgtttgaaacactctttttgcaggatctacaagtggatatttggaccactctgtgtcctccgttcgaaacgggtatatcttcacatgacatctagacagaagctttctcagaaaattctttgggatgattgagtggaactcacagaagctgaacattccttgcgatgtagcagtttagaaacacactttctgcagaatctgcaagtgcatatgtggacctctctgaggaattcgttggaaacgggataatttcagctgactaaacagaagcattctcacaaccttcttcgtgatgtctgcattcaactcacagtgtggaacctttctttgatagttcaggtttgaaacactctttttgtagaaactgcaaggggatcattgcacttctttgaggcctaccgtagtaaaggagataacttcctataaaaagaagacagaagcattctcagaaccctcttggtgatgtttgcattcaactcacggtgctgaacctttctttgatagttcagctttgaaacactctttttgtagaaactgcaagtggatatttggtcctctctgaggatttcgttggaaacgggataaaccgcacagaactaaacagaagcattctcagaactttcttcgtgatgtttgcattcaactcacagtgttgaacctttctttgatagttcaggtttgaaacggtctttctgtagaaactgcaagtagatatttggacctctctgaggatttcgttggaaacgggataaaccgcacagaactaaaacagaagcattcacagaaaactcttggtgacgactgagtttaactcacagagctgaacattcctttggatggagcagtttcgaaacacactatttctagaaggtgcaagtggatatgtgggcctctctgaggatttcgttggaaacgggataaaccgcacagaactaaacagaagcattctcagaaactactttgtgatgattgcattcaagtcacagagttgaacattccctttgacagagcagtttggaaactctctttgtgtagaatctgcaagtggagatatggaccgctttgaggcctatggtagtaaaggaaatagcttcatataaaagctagacagtagcattctcagaaacttctttgtgatgcttgcattcaactcacagagttgaactttcctttcgagagagaagctttgaaacactctttttccagaatctgcaagtggacatttggagggctttgaggcctgtggtggaaaaggaattatcttcccgtaaaagctagatagaagcattgtcagaaacttctttgtgatgattgcattcaactcacagagttgaaggttccttttcaaagagcagtttccaatcactctttgtgtggaatctgcaagtggatatttggacctattttgaagatttcgttggaaacgggagaatcttcacaggaaagctaaacagaagcattctcagaaacttctctgtgatgtttgtgttcaactcccagagtttcacattgcttttcatagagtagttctgaaacatgcttttcgtagtgtctacaagtggacatttggagcgctttcaggcctgtggtggaaaacgaattatggtcacataaaaactggagagaagccttctcagaaacttctctgtgatgattgcattcaactcacagagttgaaccctcctatggatagagcagtgttgaaactctctttttgtggaatctgcaagtggatatgtggacctctccgaagatgtctttggaaacgggaatatcttcacataaaaactaaacagaagcattctcagaaacttcttggtgatgtttgcattcaaatcccagagtcgaaccttcctttgatagttcaggtttgaaacactctttttgtaggatctgcaagtggatatttggaccactctgtggccttcgttcgaaacgggtacatcttcgcataaaatctagacagaagcattctcagaaaatactttgtgatgattgagtttaactcacagagctgaacattcctttggatggagcaggtttgagacacactttttgtagaatctacaagtggatatttggacctctctgaggatttcgttggaaacgggataactgcacctaactaaacggaagcattctcagaaactgctttgtgatgattgcattcacctcacagagttgaacattcctattgatagagcagtttggaaacactcttgttgtggaatgtgcaagtggagatttggagcgctttgaggcctatggtagtaaagggaatagcttcatagaaaaactagacagatgcattctcaggcactttttggtgacgtttgtattcaactcccagagttgaactttcctttggaaagagcagctatgaaacactgtttttctagaatctgcaagtggacgtttggagggctttgtggtttgtggtggaaaaggaaatatcttcacctaaatactagatagaagcatcctcagaagcttctctgtgatgactgcattcaactcacggagttgaacactccttttgagagcgcagttttgaaactctctttctgtggcatctgcaaggggacatgtagacctctttgaagatttcgttggaaacggaatcatcttcacataaaaactatacagaagcagtctcagaatcttctttgtgatgtttgcattcaaatcccagagttgaacttgcctttcaaagttcacgtttgaaacactctttttgcaggatctacaagtggatatttggaccactctgtgtccttcgttcgaaacgggtatatcttcacatgacatctagacagaagctttctcagaaaattctttgggatgattgagtggaactcacagagctgaacattccttgcgatgtagcagtttagaaacacactttctgcagaatctgcaagtgcatatttggacctctctgaggaattcgttggaaacgggataatttcagctgactaaacagaagcattctcagaaccttcttcgtgatgtctgcattcaactcacagtgtggaacctttctttgatagttcaggtttgaaacactctttttgtagaaactgcaaggggataattgcacttctttgaggcctaccgtagtaaaggaaataacttcctatagaaagaagacagaagcattctcagaaccctcttcgtgatgtttgcattcaactcacagtgctgaacctttctttgatagttcagctttgaaacactcttcttgtagaaactgcaagtggatatttggtcctctctgaggatttcgttggaaacgggataaaccgcacagaactaaacagaagaattctcagagccctcttcgtgatgtttgcattcaactcacagtgctgaacctttcttttgatagtgcagctttgaaacactctttttgtagaaactgcaagtggatgtttggtcctctctgaggatttcgttggaaacgggataaaccgcacagaactaaaacagaagcattgtcagaaacttctttgtgatgattgcattcaactcacagagttgaaggttccttttcaaacagcagtttccaatcactctttctgtggaatctgcaagtggatatttgggcctctctgaggatttcgttggaaacgggataaaacgcacagaactaaaacagaagcattctcagaaacttctctgtgatgtttgtgttcaactcccagagtttcacgttgcttttcatagagtagttctgaaacatgcttttcgtagtgtctgcaagtggacatttggagcgctttcaggcctgtggtggaaaacgaattatggtcacataaaaactggagagaagccttctcagaaacttctctgtgatgattgcattcaactcacagagttgaaccctcctatggatagagcagtgttgaaactctctttttgtggaatctgcaagtggatatgtggacctctccgaagatgtctttggaaacgggaatatcttcacataaaaactaaacagaagcattctcagaaacttcttggtgatgtttgcattcaaatcccagagttgaaccttcctttgatagttcaggtttgaaacactctttctgtaggatctgcaagtggctatttggaccactctgtggccttcgttcgaaacgggtatatcttcgcataaaatctagacagaagcattctcagaaaatactttgtgatgattgagtttaaatcacagagctgaccattcctttggatggagcaggtttgagacacactttttgtagaatctacaagtggatatttggacctctctgaggatttcgttggaaacgggataactgcacctaactaaacggaagcattctcagaaactgctttgtgatgattgcattcacctcacagagttgaacattcctattgatagagcagtttggaaacactcttgttgtggaatgtgcaagtggagatttggagcgctttgaggcctgtggtagtaaagggaatagcttcatagaaaaactagacagatgcattctcaggaactttttggtgatgtttgtattcaactcccagagttgaactttcctttggaaagagcagctatgaaacactctttttctagaatctgcaagtggacgtttggagggctttgtggtttgtggtggaaaaggaaatatcttcacctaaatactagatagaagcattctcagaagcttctctgtgatgactgcattcaactcacggagttgaacactccttttgagagcgcagttttgaaactctctttctgtggcatctgcaaggggacatgtagacctctttgaagatttcgttggaaacggaatcatcttcacataaaaactatacagaagcagtctcagaatcttctttgtgatgtttgcattcaaatcccagagttgaactttcctttcaaagttcacgtttgaaacactctttttgcaggatctacaagtggatatttggaccactctgtgtccttcgttcgaaacgggtatatcttcacacgacatctagacagaagctttctcagaaaattctttgggatgattgagtggaactcacagagctgaacattccttgcgatgtagcagtttagaaacacactttctgcagaatctgcaagtgcatatttggacctctctgaggaattcgttggaaacgggataatttcagctgactaaacagaagcattctcagaaccttcttcgtgatgtctgcattcaactcacagtgtggaacctttctttgatagttcaggtttgaaacactctttttgtagaaactgcaaggggataattgcacttctttgaggcctaccgtagtaaaggaaataacttcctatagaaagaagacagaagcattcttcagaaccctcttcgtgatgtttgcattcaactcacagtgctgaacctttctttgatagttcagctttgaaacactcttcttgtagaaactgcaagtggatatttggtcctctctgaggatttcgttggaaacgggataaaccgcacagaactaaacagaagaattctcagagccctcttcgtgatgtttgcattcaactcacagtgctgaacctttctttgatagtgcagctttgaaacactctttttgtagaaactgcaagtggatgtttggtcctctctgaggatttcgttggaaacgggataaaccgcacagaactaaaacagaagcattgtcagaaacttctttgtgatgattgcattcaactcacagagttgaaggttccttttcaaacagcagtttccaatcactctttctgtggaatctgcaagtggatatttgggcctctctgaggatttcgttggaaacgggataaaacgcacagaactaaaacagaagcattctcagaaacttctctgtgatgtttgtgttcaactcccagagtttcacgttgcttttcatagagtagttctgaaacatgcttttcgtagtgtctgcaagtggacatttggagcgctttcaggcctgtggtggaaaacgaattatggtcacataaaaactggagagaagccttctcagaaacttctctgtgatgattgcattcaactcacagagttgaaccctcctatggatagagcagtgttgaaactctctttttgtggaacctgcaagtggatatgtggacctctccgaagatgtctttggaaacgggaatatcttcacataaaaactaaacagaagcattctcagaaacttcttggtgatgtttgcattcaaatcccagagttgaaccttcctttgatagttcaggtttgaaacactctttctgtaggatctgcaagtggctatttggaccactctgtggccttcgttcgaaacgggtatatcttcgcataaaatctagacagaaagcattctcagaaaatactttgtgatgattgagtttaaatcacagagctgaccattcctttggatggagcaggtttgagacacactttttgtagaatctacaagtggatatttggacctctctgaggatttcgttggaaacgggataactgcacctaactaaacggagcattctcagaaactgctttgtgatgattgcattcacctcacagagttgaacatttctattgatagagcagtttggaaacactcttgttgtggaatgtgcaagtggagatttggagcgcttcgaggcctatggtagtaaagggaatagcttcatagaaaaactagacagatgcattctcaggaactttttggtgatgtttgtattcaactcccagagttgaactttcctttggaaagagcagctatgaaacactctttttctagaatctgcaagtggacgtttggagggctttgtggtttgtggtggaaaaggaaatatcttcacctaaatactagatagaagcattctcagaagcttctctgtgatgactgcattcaactcacggagttgaacactccttttgagagcgcagttttgaaactctctttctgtggcatctgcaaggggacatgtagacctctttgaagatttcgttggaaacggaatcatcttcacatcaaaactatacagaagcagtctcagaatcttctttgtgatgtttgcattcaaatcccagagttgaactttcctttccaagttcacgtttgaaacactctttttgcaggatctacaagtggatatttggaccactctgtgtccttcgttcgaaacgtgtatatcttcacatgacatctagacagaagctttctcagaaaattctttgggatgattgagttgagcaaacagagctgaacactccttgcgatgtagcagtttagaaacacactttctgcagaatctgcaagtgcatatgtggacctctctgaggaaatcgttggaaacgggataatttcagctgactaaacagaagcattctcagaaccttcttcgtgatgtctgcattcaactcacagtgtggaacctttctttgatagttcaggtttgaaacactctttttgtagaaactgcaaggggataattgcacttctttgaggcctaccgtagtaaaggaaataacttcctatagaaagaagacagaagcattctcagaaccctcttcgtgatgtttgcattcaactcacagtgctgaacctttctttgatagttcagctttgaaacactcttcttgtagaaactgcaagtggatatttggtcctctctgaggatttcgttggaaacgggataaaccgcacagaactaaacagaagaattctcagagccctcttcgtgatgtttgcattcaactcacagtgctgaacctttctttgatagtgcagctttgaaacactctttttgtagaaactgcaagtggatgtttggtcctctctgaggatttcgttggaaacgggataaaccgcacagaactaaaacagaagcattgtcagaaacttctttgtgatgattgcattcaactcacagagttgaaggttccttttcaaacagcagtttccaatcactctttctgtggaatctgcaagtggatatttggacctctttgaagatttcattggaaaagggataatcttcacagaaaagctaaacagaagcattctcagaaacttctctgtgatgtttgtgttcaactcccagagtttcacattgcttttcatagagtagttctgaaacatgcttttcgtagtgtctgcaagtggacatttggagggctttcaggcctgtggtggaaaacgaattatggtcacataaaaactggagagaagccttctcagaaacttctctgtgatgattgcattcaactcacagagttgaaccctcctatggatagagcagtgttgaaactctctttttgtggaatctgcaagtggatatgtggacctctccgaagatgtctttggaaacgggaatatcttcacataaaaactaaacagaagcattctcagaaacttcttggtgatgtttgcattcaaatcccagagttgaaccttcctttgatagttcaggtttgaaacactctttttgtaggatctgcaagtggctatttggaccactctgtggccttcgttcgaaacgggtatatcttcgcataaaatctagacagaaagcattctcagaaaatactttgtgatgattgagtttaaatcacagagctgaacattcctttggatggagcaggtttgagacacactttttgtagaatctacaagtggatatttggacctctcagaggatttcgttggaaacgggataactgcacctaactaaacggaagcattctcagaaactgctttgtgatgattgcattcacctcacagagttgaacattcctattgatagagcagtttggaaacactcttgttgtggaatgtgcaagtggagatttggagcgctttgaggcctatggtagtaaagggaatagcttcatagaaaaactagacagatgcattctcaggaactttttggtgatgtttgtattcaactcccagagttgaactttcctttggaaagagcagctatgaaacactctttttctagaatctgcaagtggacgtttggagggctttgtggtttgtggtggaaaaggaaatatcttcacctaaatactagatagaagcatcctcagaagcttctctgtgatgactgcattcaactcacggagttgaacactccttttgagagcgcagttttgaaactctctttctgtggcatctgcaaggggacatgtagacctctttgaagatttcgttggaaacggaatcatcttcacataaaaactacacagaagcagtctcagaatcttctttgtgatgtttgcattcaaatccccgagttgaactttcctttcaaagttcacgtttgaaacactctttttgcaggatctacaagtggatatttggaccactctgtgtccttcgttcgaaacgggtatatcttcacatgacatctagacagaagctttctcagaaaattctttgggatgattgagttgaactcacagagctgagcattccttgtgatgtagcagtttagaaacacactttctgcagaatctgcaagtgcatatttggacctctgtgaggaattcgttggaaacgggataatttcagctgactaaacagaagcattctcagaaccttcttcgtgatgtctgcattcaactcacagtgtggaacctttctttgatagttcaggtttgaaacactctttttgtagaaactgcaaggggataattgcactctttgaggagtaccgtagtaaaggaaataacttcctataaaaagaagacagaagcattctcagaaccctcttcgtgatgtttgcattcaactcacagtgctgaacctttctttgatagttcagctttgaaacactctttttgtagaaactgcaagtggatatttggtcctctctgagcatttcgttggaaacgggataaactgcacagaactaaacagaagcattctcagaaccttcttcgtgatgtttgcattcaactcacagtgttgaacctttctttgatagttcaggtttgaaacggtctttctgtagaaactgcaagtagatatttggacctctctgaggatttcgttggaaacgggataacccgcacagaactaaaacagaagcattcacagaaaactcttggtgacgactgagtttaactcacagagctgaacattcctttggatggagcagttttgaaacacactatttgtagaatgtgcaagtggatatttaggcctctctgaggatttcgttggaaacgggataaaccgcacagaactaaacagaagcattctcagaaactactttgtgatgattgcattcaagtcacagagttgaacattccctttgacagagcagtttggaaactctctttgtgtagaatctgcaagtggagatatggaccgctttgaggcctatggtagtaaaggaaatagcttcatataaaagctagacagtagcattctcagaaacttctttgtgatgcttgcattcaactcacagagttgaactttcctttcgagagagaagctttgaaacactctttttccagaatctgcaagtggacatttggagggctttgaggcctgtggtggaaaaggaattatcttcccgtaaaagctagatagaagcattgtcagaaacttctttgtgatgattgcattcaactcacagagttgaaggttccttttcaaagagcagtttccaatcactctttctgtggaatctgcaagtggatatttggacctattttgaagatttcgttggaaacgggagaatcttcacaggaaagctaaacagaagcattctcagaaacttctctgtgatgtttgtgttcaactcccagagtttcacattgcttttcatagagtagttctgaaacatgcttttcgtagtgtctacaagtggacatttggagcgctttcaggcctgtggtggaaaacgaattatggtcacataaaaactggagagaagccttctcagaaacttctctgtgatgattgcattcaactcacagagttgaaccctcctatggatagagcagtgttgaaactctctttttgtggaatctgcaagtggatatgtggacctctccgaagatgtctttggaaacgggaatatcttcacataaaaactaaacagaagcattctcagaaacttcttggtgatgtttgcattcaaatcccagagttgaaccttcctttgatagttcaggtttgaaacactctttttgtaggatctgcaagtggatatttggaccactctgtggccttcgttcgaaactggtatatcttcgcataaaatccagacagaagcattctcagaaaatactttgtgatgattgagtttaaatcacagagctgaacattcctttggatggagcaggtttgagacacactttttgtagaatctacaagtggatatttggacctctctgaggatttcgttggaaacgggataactgcacctaactaaacggaagcattctcagaaactgctttgtgatgattgcattcacctcacagagttgaacattcctattgatagagcagtttggaaacactcttgttgtggaatgtgcaagtggagatttggagcgctttgaggcctatggtagtaaagggaatagcttcatagaaaaactagacagatgcattctcaggaactttttggtgatgtttgtattcaactcccagagttgaactttcctttggaaagagcagctatgaaacactctttttctagaatctgcaagtggacgtttggagggctttgtggtttgtggtggaaaaggaaatatcttcacctaaatactagatagaagcattctcagaagcttctctgtgatgactgcattcaactcacggagttgaacactccttttgagagcgcagttttgaaactctctttctgtggcatctgcaaggggacatgtagacctctttgaagatttcgttggaaacggaatcatcttcacataaaaactatacagaagcagtctcagaatcttctttgtgatgtttgcattcaaatcccagagttgaactttcctttcaaagttcacgtttgaaacactctttttgcaggatctacaagtggatatttggaccactctgtgtccttcgttcgaaacgggtatatcttcacacgacatctagacagaagctttctcagaaaattctttgggatgattgagtggaactcacagagctgaacattccttgcgatgtagcagtttagaaacacactttctgcagaatctgcaagtgcatatttggacctctctgaggaattcgttggaaacgggataatttcagctgactaaacagaagcattctcagaaccttcttcgtgatgtctgcattcaactcacagtgtggaacctttctttgatagttcaggtttgaaacactctttttgtagaaacttcaaggggataattgcacttctttgaggcctaccgtagtaaaggaaataacttcctatagaaagaagacagaagcattctcagaaccctcttcgtgatgtttgcattcaactcacagtgctgaacctttctttgatagttcagctttgaaacactcttcttgtagaaactgcaagtggatatttggtcctctctgaggatttcgttggaaacgggataaaccgcacagaactaaacagaagaattctcagagccctcttcgtgatgtttgcattcaactcacagtgctgaacctttctttgatagtgcagctttgaaacactctttttgtagaaactgcaagtggatgtttggtcctctctgaggatttcgttggaaacgggataaaccgcacagaactaaaacagaagcattgtcaggaaacttctttgtgatgattgcattcaactcacagagttgaaggttccttttcaaacagcagtttccaatcactctttctgtggaatctgcaagtggatatttgggcctctctgaggatttcgttggaaacgggataaaacgcacagaactaaaacagaagcattctcagaaacttctctgtgatgtttgtgttcaactcccagagtttcacgttgcttttcatagagtagttctgaaacatgcttttcgtagtgtctgcaagtggacatttggagcgctttcaggcctgtggtggaaaacgaattatggtcacataaaaactggagagaagccttctcagaaacttctctgtgatgattgcattcaactcacagagttgaaccctcctatggatagagcagtgttgaaactctctttttgtggaatctgcaagtggatatgtggacctctccgaagatgtctttggaaacgggaatatcttcacataaaaactaaacagaagcattctcagaaacttcttggtgatgtttgcattcaaatcccagagttgaaccttcctttgatagttcaggtttgaaacactctttctgtaggatctgcaagtggctatttggaccactctgtggccttcgttcgaaacgggtatatcttcgcataaaatctagacagaagcattctcagaaaatactttgtgatgattgagtttaaatcacagagctgaccattcctttggatggagcaggtttgagacacactttttgtagaatctacaagtggatatttggacctctctgaggatttcgttggaaacgggataactgcacctaactaaacgggaagcattctcagaaactgctttgtgatgattgcattcacctcacagagttgaacattcctattgatagagcagtttggaaacactcttgttgtggaatgtgcaagtggagatttggagcgctttgaggcctatggtagtaaagggaatagcttcatagaaaaactagacagatgcattctcaggaaccttttggtgatgtttgtattcaactcccagagttgaactttcctttggaaagagcagctatgaaacactctttttctagaatctgcaagtggacgtttggagggctttgtggtttgtggtggaaaaggaaatatcttcacctaaatactagatagaagcattctcagaagcttctctgtgatgactgcattcaactcacggagttgaacactccttttgagagcgcagttttgaaactctctttctgtggcatctgcaaggggacatgtagacctctttgaagatttcgttggaaacggaatcatcttcacataaaaactatacagaagcagtctcagaatcttctttgtgatgtttgcattcaaatcccagagttgaactttcctttcaaagttcacgtttgaaacactctttttgcaggatctacaagtggatatttggaccactctgtgtccttcgttcgaaacgggtatatcttcacacgacatctagacagaagctttctcagaaaattctttgggatgattgagtggaactcacagagctgaacattccttgcgatgtagcagtttagaaacacactttctgcagaatctgcaagtgcatatttggacctctctgaggaattcgttggaaacgggataatttcagctgactaaacagaagcattctcagaaccttcttcgtgatgtctgcattcaactcacagtgtggaacctttctttgatagttcaggtttgaaacactctttttgtagaaactgcaaggggataattgcacttctttgaggcctaccgtagtaaaggaaataacttcctatagaaagaagacagaagcattctcagaaccctcttcgtgatgtttgcattcaactcacagtgctgaacctttctttgatagttcagctttgaaacactcttcttgtagaaactgcaagtggatatttggtcctctctgaggatttcgttggaaacgggataaaccgcacagaactaaacagaagcattctcagaaccttcttcgtgatgtttgcattcaactcacagtgttgaacctttctttgatagttcaggtttgaaacggtctttctgtagaaactgcaagtagatatttggacccctctgaggatttcgttggaaacgggataaaccgcacagaactaaaacagaagcattcacagaaaactcttggtgacgactgagtttaactcacagagctgaacattcctttggatggagcagtttcgaaacacactatttgtagaatgtgcaagtggatatttgggcctctctgaggatttcgttggaaacgggataaaccgcacagaactaaacagaagcattctcagaaactactttgtgatgattgcattcaagtcacagagttgaacattccctttgacagagcagtttggaaactctctttctgtagaatctgcaagtggagatatggaccgctttgaggcctatggtagtaaaggaaatagcttcatataaaagctagacagtagcattctcagaaacttctttgtgatgcttgcattcaactcacagagttgaactttcctttcgagagagaagctttgaaacactctttttccagaatctgcaagtggacatttggagggctttgaggcctgtggtagaaaaggaattaacttcccgtaaaagctagatagaagcattgtcagaaacttctttgtgatgattgcattcaactcacagagatgaaggttccttttcaaacagcagtttccaaacactctttctgtggaatctgcaagtggatatttggatctctttgaagatttcgttggaaacgggagaatcttcacagaaaagctaaacagaagcattctcagaaacttctctgtgatgtttgtgttcaactcccagagtttcacattgcttttcatagagtagttctgaaacatgcttttcgtagtgtctgcaagtggacatttggagcgctttcaggcctgtggtgcaaaacgaattatggtcccataaaaactggagagaagccttctcagaaacttctctgtgatgattgcattcaactcacagatttgaaccctcctatggatagagcattgttgaaactctctttttgtggaatctgcaagtggatatgtggacctctctgaagatgtctttggaaacgggaatatcttcacataaaaactaaacagaagcattctcagaaacttcttggtgatgtttgcattcaaatcccagagttgaaccttcctgtgatagttcaggtttgaaacactctttttgtaggatcttcaagtggatatttggaccactctgtggccttcgttcgaaacgggtacatcttcacataaaatctagacagaagcattctcagaaaatactttgtgatgattgagtttaactcacagagctgaacattcctttggatggagcaggtttgagacacactttttgtagaatctacaagtggatatttggacctctctgaggatttcgttggaaacgcgataactgcacctaactaaacggaagcattctcagaaactgctttgtgatgattgcattcacctcacagagttgaacattcctattgatagagcagtttggaaacactcttgttgtggaatgtgcaagtggagatttggagcgctttgaggcctatggtagtaaagggaatagcttcatagaaaaactagacagatgcattctcaggaactttttggtgatgtttgtattcaactcccagagttgaactttcctttggaaagagcagctatgagacactgtttctctagaatctgcaagtggacgtttggagggctttgtggtttgtggtggaaaaggaaatatcttcacctaaatactagatagaagcattctcagaagcttctctgtgatgactgcattcaactcacggagttgaacactccttttgagagcgcagttttgaaactctctttctgtggcatctgcaaggggacatgtagacctctttgaagatttcgttggaaacggaatcatcttcacataaaaactatacagaagcagtctcagaatcttctttgtgatgtttgcattcaaatccccgagttgaactttcctttcaaagttcacgtttgaaacactctttttgcaggatctacaagtggatatttggaccactctgtgtccttcgttcgaaacgggtatatcttcacatgacatctagacagaagctttctcagaaaattctttgggatgattgagttgaactcacagagctgagcattccttgcgatgtagcagtttagaaacacactttctgcagaatctgcaagtgcatatttggacctctgtgaggaattcgttggaaacgggataatttcagctgactaaacagaagcattctcagaaccttcttcgtgatgtctgcattcaactcacagtgtggaacctttctttgatagttcaggtttgaaacactctttctgtagaaactgcaaggggataattgcactctttgaggagtaccgtagtaaaggaaataacttcctataaaaagaagacagaagcattctcagaaccctcttcgtgatgtttgcattcaactcacagtgctgaacctttctttgatagttcagctttgaaacactctttttgtagaaactgcaagtggatatttggtcctctctgagcatttcgttggaaacgggataaactgcacagaactaaacagaagcattctcagaaccttcttcgtgatgtttgcattcaactcacagtgttgaacctttctttgatagttcaggtttgaaacggtctttctgtagaaactgcaagtagatatttggacctctctgaggatttcgttggaaacgggataacccgcacagaactaaaacagaagcattcacagaaaactcttggtgacgactgagtttaactcacagagctgaacattcctttggatggagcagtttcgaaacacactatttgtagaatgtgcaagtggatatttgggcctctctgaggatttcgttggaaacgggataaaccgcacagaactaaacagaagcattctcagaaactactttgtgatgattgcattcaagtcacagagttgaacattccctttgacagagcagtttggaaactctctttctgtagaatctgcaagtggagatatggaccgctttgaggcctatggtagtaaaggaaatagcttcatataaaagctagacagtagcattctcagaaacttctttgtgatgcttgcattcaactcacagagttgaactttcctttcgagagagaagctttgaaacactctttttccagaatctgcaagtggacatttggagggctttgaggcctgtggtggaaaaggaattaacttcccgtaaaagctagatagaagcattgtcagaaacttctttgtgatgattgcattcaactcacagagatgaaggttcctttacaaacagcagtttccaaacactctttctgtggaatctgcaagtggatatttggacctctttgaagatttcgttggaaacgggagaatcttcacagaaaagctaaacagaagcattctcagaaacttcctgtgatgtttgtgttcaactcccagagtttcacattgcttttcatagagtagttctgaaacataattttcgtagtgtctgcaagtggacatttggagcgctttcaggcctgtggtggaaaacgaattatggtcccataaaaactggagagaagccttctcagaaacttctctgtgatgattgcattcaactcacagatttgaaccctcctatggatagagcagtgttgaaactctctttttgtggaatctgcaagtggatatgtggacctctccgaagatgtctttggaaacgggaatatcttcacataaaaactaaacagaagcattctcagaaacttcttggtgatgtttgcattcaaatcccagagttgaaccttcctgtgatagttcaggtttgaaacactctttttgtaggatctgcaagtggatatttggaccactctgtggccttcgttcgaaacgggtacatcttcacataaaatctagacagaagcattctcagaaaatactttgtgatgattgagtttaactcacagagctgaacattcctttggatggagcaggtttgagacacactttttgtagaatctacaagtggatatttggacctctctgaggatttcgttggaaacgcgataactgcacctaactaaacggaagcattctcagaaactgctttgtgatgattgcattcacctcacagagttgaacattcctattgatagagcagtttggaaacactcttgttgtggaatgtgcaagtggagatttggagcgctttgaggcctatggtagtaaagggaatagcttcatagaaaaactagacagatgcattctcaggaactttttggtgatgtttgtattcaactcccagagttgaactttcctttggaaagagcagctatgaaacactctttttctagaatctgcaagtggacgtttggagggctttgtggtttgtggtggaaaaggaaatatcttcacctaaatactagatagaagcattctcagaagcttctctgtgatgactgcattcaactcacggagttgaacactccttttgagagcgcagttttgaaactctctttctgtggcatctgcaaggggacatgtagacctctttgaagatttcgttggaaacggaatcatcttcacatcaaaactatacagaagcagtctcagaatcttctttgtgatgtttgcattcaaatcccagagttgaactttcctttccaagttcacgtttgaaacactctttttgcaggatctacaagtggatatttggaccactctgtgtccttcgttcgaaacgggtatatcttcacatgacatctagacagaagctttctcagaaaattctttgggatgattgagttgagcaaacagagctgaacactccttgtgatgtagcagtttagaaacacactttctgcagaatctgcaagtgcatatgtggacctctctgaggaattcgttggaaacgggataatttcagctgactaaacagaagcattctcagaaccttcttcgtgatgtctgcgttcaactcacagtgtggaacctttctttgatagttcaggtttgaaacactctttttgtagaaactgcaaggggatcattgcacttctttgaggcctaccgtagtaaaggagataacttcctataaaaagaagacagaagcattcacagaaaactcttggtgacgactgagtttaactcacagagctgaacattcctttggatggagcagtttcgaaacacactatttgtagaatgtgcaagtggatatgtgggcctctctgaggatttcgttggaaacgggataaaccgcacagaactaaacagaagcattctcagaaactactttgtgatgatttcattcaagtcacagagttgaacattccctttgacagagcagtttggaaactctctttgtgtagaatctgcaagtggagatatggaccgctttgaggcctatggtagtaaaggaaatagcttcatataaaagctagacagtagcattctcagaaacgtctttgtgatgcttgcattcaactcacagagttgaactttcctttcgagagagaagctttgaaacagtctttttccagaatctgcaagtggacatttggagggctttgaggcctgtggtggaaaaggaattatcttcccgtaaaagctagatagaagcattgtcagaaacttctttgtgatgattgcattcaagtcacagagttgaaggttccttttcaaagagcagtttccaatcactctttctgtggaatctgcaagtggatatttggacctctttgaagatttcgttggaaacgggagaatcttcacagaaaagctaaacagaagcattctcagaaacttctctgtgatgtttgtgttcaactcccagagtttcacattgcttctcatagagtagttctgaaacatgcttttcgtagtgcctgcaagtggacatttggagcgctttcaggcctgtggtggaaaacgaattatggtcacataaaaactggagagaagccttctcagaaacttctctgtgatgattgcattcaactcacagagttgaaccctcctatggatagagcagtgttgaaactctctttttgtggaatctgcaagcggatatgtggacctctccgaagatgtctttggaaacgggaatatcttcacataaaaactaaacagaagcattctcagaaacttcttggtgatgtttgcattcaaatcccagagttgaaccttcctttgagagttcaggtttgaaacactctttttgtaggatctgcaagtggatatttggaccactctgtggccttcgttcgaaacgggtacatcttcgcataaaatctagacagaagcattctcagaaaatactttgtgatgattgagttgaactcacagagctgaacattcctttggatggagcaggtttgagacacactttttgtagaatctacaagtggatatttggacctctctgaggatttcgttggaaacgggataactgcacctaactaaacggaagcattctcagaaactgctttgtgatgattgcattcacctcgcagagttgaacattcctattgatagagcagtttggaaacactcttgttgtggaatgtgcaagtggagatttggagcgctttgaggcctatggtagtaaagggaatagcttcatagaaaaactagacagatgcattctcaggaactttttggtgatgtttgtattcaactcccagagttgaactttcctttggaaagagcagctatgaaacactctttttctagaatctgcaagtggacgtttggagggctatgtggtttgtggtggaaaaggaaatattttcacctaaatactagataggagcattctcagaagcttctctgtgatgactgcattcaactcacggagttgaacactccttttgagagcgcagttttgaaactctttctgtggcatctgcaaggggacatgtagacctctttgaagatttcgttggaaacggaatcatcttcacataaaaactatacagaagcagtctcagaatcttctttgtgatgtttgcattcaaatcccagagttgaactttcctttcaaagttcacgtttgaaacactctttttgcaggatctacaagtggatatttggaccactctgtgtccttcgttcgaaacgggtatatcttcacatgacatctagacagaagctttctcagaaaattctttgggatgattgagtggaactcacagagatgaacattccttgcgatgtagcagtttagaaacacactttctgcagaatctgcaagtgcatatttggacctctctgaggaattcgttggaaacgggataatttcagctgactaaacagaagcattctcagaaccttcttcgtgatgtctgcattcaactcacagtgtggaacctttctttgatagttcaggtttgaaacactctttttgtagaaactgcaaggggataattgcacttctttgaggcctaccgtagtaaaggaaataacttcctatagaaagaagacagaagcattctcagaaccctcttcgtgatgtttgcattcaactcacagtgctgaacctttctttgatagttcagctttgaaacactcttcttgtagaaactgcaagtggatatttggtcctctctgaggatttcgttggaaacgggataaaccgcacagaactaaacagaagaattctcagagccctcttcgtgatgtttgcattcaactcacagtgctgaacctttctttgatagtgcagctttgaaacactctttttgtagaaactgcaagtggatgtttggtcctctctgaggatttcgttggaaacgggataaaccgcacagaactaaaacagaagcattgtcagaaacttctttgtgatgattgcattcaactcacagagttgaaggttccttttcaaacagcagtttccaatcactctttctgtggaatctgcaagtggatatttgggcctctctgaggatttcgttggaaacgggataaaacgcacagaactaaaacagaagcattctcagaaacttctctgtgatgtttgtgttcaactcccagagtttcacgttgcttttcatagagtagttctgaaacatgcttttcgtagtgtctgcaagtggacatttggagcgctttcaggcctgtggtggaaaacgaattatggtcacataaaaactggagagaagccttctcagaaacttctctgtgatgattgcattcaactcacagagttgaaccctcctatggatagagcagtgttgaaactctctttttgtggaatctgcaagtggatatgtggacctctccgaagatgtctttggaaacgggaatatcttcacataaaaactaaacagaagcattctcagaaacttcttggtgatgtttgcattcaaatcccagagttgaaccttcctttgatagttcaggtttgaaacactctttctgtaggatctgcaagtggctatttggaccactctgtggccttcgttcgaaacgggtatatcttcgcataaaatctagacagaagcattctcagaaaatactttgtgatgattgagtttaaatcacagagctgaccattcctttggatggagcaggtttgagacacactttttgtagaatctacaagtggatatttggacctctctgaggatttcgttggaaacgggataactgcacctaactaaacggaagcattctcagaaactgctttgtgatgattgcattcacctcacagagttgaacattcctattgatagagcagtttggaaacactcttgttgtggaatgtgcaagtggagatttggagcgctttgaggcctatggtagtaaagggaatagcttcatagaaaaactagacagatgcattctcaggaactttttggtgatgtttgtattcaactcccagagttgaactttcctttggaaagagcagctatgaaacactctttttctagaatctgcaagtggacgtttggagggctttgtggtttgtggtggaaaaggaaatatcttcacctaaatactagatagaagcattctcagaagcttctctgtgatgactgcattcaactcacggagttgaacactccttttgagagcgcagttttgaaactctctttctgtggcatctgcaaggggacatgtagacctctttgaagatttcgttggaaacggaatcatcttcacataaaaactatacagaagcagtctcagaatcttctttgtgatgtttgcattcaaatcccagagttgaactttcctttccaagttcacgtttgaaacactctttttgcaggatctacaagtggatatttggaccactctgtgtccttcgttcgaaacgggtatatcttcacatgacatctagacagaagctttctcagaaaattctttgggatgattgagttgagcaaacagagctgaacactccttgtgatgtagcagtttagaaacacactttctgcagaatctgcaagtgcatatgtggacctctctgaggaattcgttggaaacgggataatttcagctgactaaacagaagcattctcagaaccttcttcgtgatgtctgcattcaactcacagtgtggaacctttctttgatagttcaggtttgaaacactctttttgtagaaactgcaaggggatcattgcacttctttgaggcctaccgtagtaaaggagataacttcctataaaaagaagacagaagcattctcagaaccatcttcgtgatgtttgcattcaactcacggtgctgaacctttctttgatagttcagctttgaaacactctttttgtagaaactgcaagtggatatttggtcctctctgaggatttcgttggaaacgggataaaccgcacagaactaaacagaagcattctcagaaccttcttcgtgatgtttgcattcaactcacagtgttgaacctttctttgatagttcaggtttgaaacggtctttctgtagaaactgcaagtagatatttggacctctctgaggatttcgttggaaacggggtaacccgcacagaactaaaacagaagcattcacagaaaactcttggtgacgactgagtttaactcacagagctgaacattcctttggatggagcagtttcgaaacacactatttgtagaatctgcaagtggatatttgggcctctctgaggatttcgttggaaacgggataaaacgcacagaactaaaacagaagcattctcagaaactactttgtgatgattgcattcaagtcacagagttgaacattccctttgacagagcagtttggaaactctctttgtgtagaatctgcaagtggagatatggaccgctttgaggcctatggtagtaaaggaaatagcttcatataaaagctagacagtagcattctcagaaacttctttgtgatgcttgcattcaactcacagagttgaactttcctttcgagagagaagctttgaaacactctttttccagaatgtgcaagtggacatttggggagctttgaggcctgtggtggaaaaggaattatcttcccgtaaaagctagatagaagcattgtcagaaacttctttgtgatgattgcattcaactcacagagttgaaggttccttttcaaacagcagtttccaatcactctttctgtggaatctgcaagtggatatttcgacctctttgaagatttcgttggaaacgggagaatcttcacagaaaagctaaacagaagcattctcagaaacttctctgtgatgtttgagttcaactcccagagtttcacgttgcttttcatagagtagttctgaaacatgcttttcgtagtgtctgcaagtggacatttggagcgctttcaggcctgtggtggaaaacgaattatggtcacataaaaactggagagaagccttctcagaaacttctctgtgatgattgcattcaactcacagagttgaaccctcctatggatagagcagtgttgaaactctctttttgtggaatctgcaagtggatatgtggacctctccgaagatgtctttggaaacgggaatatcttcacataaaaactaaacagaagcattctcagaaacttcttggtgatgtttgcattcaaatcccagagttgaaccttcctttgatagttcaggtttgaaacactctttctgtaggatctgcaagtggctatttggaccactctgtggccttcgttcgaaacgggtatatcttcgcataaaatctagacagaagcattctcagaaaatactttgtgatgattgagtttaaatcacagagctgaccattcctttggatggagcaggtttgagacacactttttgtagaatctacaagtggatatttggacctctctgaggatttcgttggaaacgggataactgcacctaactaaacggaagcattctcagaaactgctttgtgatgattgcattcacctcacagagttgaacattcctattgatagagcagtttggaaacactcttgttgtggaatgtgcaagtggagatttggagcgctttgaggcctgtggaagtaaagggaatagcttcatagaaaaactagacagatgcattctcaggaactttttggtgatgtttgtattcaactcccagagttgaactttcctttggaaagagcagctatgaaacactctttttctagaatctgcaagtggacgtttggagggctttgtggtttgtggtggaaaaggaaatatcttcacctaaatactagatagaagcattctcagaagcttctctgtgatgactgcattcaactcacggagttgaacactccttttgagagcgcagttttgaaactctctttctgtggcatctgcaaggggacatgtagacctctttgaagatttcgttggaaacggaatcatcttcacataaaaactatacagaagcagtctcataatcttctttgtgatgtttgcattcaaatcccagagttgaactttcctttcaaagttcacgtttgaaacactctttttgcaggatctacaagtggatatttggaccactctgtgtctttcgttcgaaacgggtatatcttcacatgacatctagacagaagctttctcagaaaattctttgggatgattgagttgaactcacagagctgagcattccttgcgatgtagcagtttagaaacacactttctgcagaatctgcaagtgcatatgtggacctctctgaggaattcgttggaaacaggataatttcagctgactaaacagaagcattctcagaaccttcttcgtgatgtctgcattcaactcacagtgtggaacctttctttgatagttcaggtttgaaacactctttttgtagaaactgcaaggggataattgcacttctttgaggcctaccgtagtaaaggaaataacttcctatagaaagaagacagaagcattctcagaaccctcttcgtgatgtttgcattcaactcacagtgctgaacctttctttgatagttcagctttgaaacactcttcttgtagaaactgcaagtggatatttggtcctctctgaggatttcgttggaaacgggataaaccgcacagaactaaacagaagaattctcagagccctattcgtgatgtttgcattcaactcacagtgctgaacctttctttgatagtgcagctttgaaacactctttttgtagaaactgcaagtggatgtttggtcctctctgaggatttcgttggaaacgggataaaccgcacagaactaaaacagaagcattgtcagaaacttctttgtgatgattgcattcaactcacagagttgaaggttccttttcaaacagcagtttccaatcactctttctgtggaatctgcaagtggatatttgggcctctctgaggatttcgttggaaacgggataaaccgcacagaactaaaacagaagcattctcagaaacttctctgtgatgtttgtgttcaactcccagagtttcacgttgcttttcatagagtagttctgaaacatgcttttcgtagtgtctgcaagtggacatttggagcgctttcaggcctgtggtggaaaacgaattatggtcacataaaaactggagagaagccttctcagaaacttctctgtgatgattgcattcaactcacagagttgaaccctcctatggatagagcagtgttgaaactctctttttgtggaatctgcaagtggatatgtggacctctccgaagatgtctttggaaacgggaatatcttcacataaaaactaaacagaagcattctcagaaacttcttggtgatgtttgcattcaaatcccagagttgaaccttcctttgatagttcaggtttgaaacactctttctgtaggatctgcaagtggctatttggaccactctgtggccttcgttcgaaacgggtatatcttcgcataaaatctagacagaagcattctcagaaaatactttgtgatgattgagtttaaatcacagagctgaccattcctttggatggagcaggtttgagacacactttttgtagaatctacaagtggatatttggacctctctgaggatttcgttggaaacgggataactgcacctaactaaacggaagcattctcagaaactgctttgtgatgattgcattcacctcacagagttgaacattcctattgatagagcagtttggaaacactcttgttgtggaatgtgcaagtggagatttggagcgctttgaggcctatggtagtaaagggaatagcttcatagaaaaactagacagatgcattctcaggaaccttttggtgatgtttgtattcaactcccagagttgaactttcctttggaaagagcagctatgaaacactctttttctagaatctgcaagtggacgtttggagggctttgtggtttgtggtggaaaaggaaatatcttcacctaaatactagatagaaagcattctcagaagcttctctgtgatgactgcattcaactcacggagttgaacactccttttgagagcgcagttttgaaactctctttctgtggcatctgcaaggggacatgtagacctctttgaagatttcgttggaaacggaatcatcttcacataaaaactatacagagcagtctcagaatcttctttgtgatgtttgcattcaaatcccagagttgaactttcctttcaaagttcacgtttgaaacactctttttgcaggatctacaagtggatatttggaccactcctgtgtccttcgttcgaaacgggtatatcttcacacgacatctagacagaagctttctcagaaaattctttgggatgattgagtggaactcacagagctgaacattccttgcgatgtagcagtttagaaacacactttctgcagaatctgcaagtgcatatttggacctctctgaggaattcgttggaaacgggataatttcagctgactaaacagaagcattctcagaaccttcttcgtgatgtctgcattcaactcacagtgtggaacctttctttgatagttcacgtttgaaacactctttttgtagaaactgcaaggggataattgcacttctttgaggcctaccgtagtaaaggaaataacttcctatagaaagaagacagaagcattctcagaaccctcttcgtgatgtttgcattcaactcacagtgctgaacctttctttgatagttcagctttgaaacactcttcttgtagaaactgcaagtggatatttggtcctctctgaggatttcgttggaaacgggataaaccgcacagaactaaacagaagaattctcagagccctcttcgtgatgtttgcattcaactcacagtgctgaacctttctttgatagtgcagctttgaaacactctttttgtagaaactgcaagtggatgtttggtcctctctgaggatttcgttggaaacgggataaaccgcacagaactaaaacagaagcattgtcagaaacttctttgtgatgattgcattcaactcacagagttgaaggttccttttcaaacagcagtttccaatcactctttctgtggaatctgcaagtggatatttgggcctctctgaggatttcgttggaaacgggataaaacgcacagaactaaaacagaagcattctcagaaacttctctgtgatgtttgtgttcaactcccagagtttcacgttgcttttcatagagtagttctgaaacatgcttttcgtagtgtctgcaagtggacatttggagcgctttcaggcctgtggtggaaaacgaattatggtcacataaaaactggagagaagccttctcagaaacttctctgtgatgattgcattcaactcacagagttgaaccctcctatggatagagcagtgttgaaactctctttttgtggaatctgcaagtggatatgtggacctctccgaagatgtctttggaaacgggaatatcttcacataaaaactaaacagaagcattctcagaaacttcttggtgatgttttcattcaaatcccagagttgaaccttcctttgatagttcaggtttgaaacactctttttgtaggatctgcaagtggctatttggaccactctgtggccttcgttcgaaacgggtatatcttcgcataaaatctagacagaagcattctcagaaaatactttgggatgattgagtttaaatcacagagctgaccattcctctggatggagcaggtttgagacacactttttgtagaatctacaagtggatatttggacctctctgaggatttcgttggaaacgggataactgcacctaactaaacggaagcattctcagaaactgctttgtgatgattgcattcacctcacagagttgaacattcctattgatagagcagtttggaaacactcttgttgtggaatgtgcaagtggagatttggagcgctttgaggcctatggtagtaaagggaatagcttcatagaaaaactagacagatgcattctcaggaactttttggtgatgtttgtattcaactcccagagttgaactttcctttggaaagagcagctatgaaacactctttttctagaatctgcaagtggacgtttggagggctttgtggtttgtggtggaaaaggaaatatcttcacctaaatactagagagaagcattctcagaagcttctctgtgatgactgcattcaactcacggagttgaacactcctttttagagcgcagttttgaaactctctttctgtggcatctgcaaggggacatgtagacctctttgaagatttcgttggaaacggaatcatcttcacataaaaactatacagaagcagtctcagaatcttctttgtgatgtttgcattcaaatcccagagttggactttcctttcaaagttcacgtttgaaacactctttttgcaggatctacaagtggatatttggaccactctgtgtccttcgttcgaaacgggtatatcttcacatgacatctagacagaagctttctcagaaaattctttgggatgattgagttgaactcacagagctgaacattccttgcgatgtagcagtttagaaacacactttctgcagaatctgcaagtgcatatttggacctctctgaggaattcgttggaaacgggataatttcagctgactaaacagaagcattctcagaaccttcttcgtgatgtctgcattcaactcacagtgtggaacctttctttgatagttcaggtttgaaacactctttttgtagaaactgcaaggggataattgcacttctttgaggcctaccgtagtaaaggaaataacttcctataaaaagaagacagaagcattctcagaaccctcttcgtgatgtttgcattcaactcacagtgctgaacctttctttgatagttcagctttgaaacactcttcttgtagaaactgcaagtggatatttggtcctctctgaggatttcgttggaaacgggataaaccgcacagaactaaacagaagaattctcagagccctcttcgtgatgtttgcattcaactcacagtgctgaacctttctttgatagtgcagctttgaaacactctttttgtagaaactgcaagtggatatttggtcctctctgaggatttcgttggaaacgggataaaccgcacagaactaaaacagaagcattgtcagaaacttctttgtgatgattgcattcaactcacagagttgaaggttccttttcaaacagcagtttccaatcactctttctgtggaatctgcaagtggatatttgggcctctctgaggatttcgttggaaacgggataaaacgcacagaactaaaacagaagcattctcagaaacttctctgtgatgtttgtgttcaactcccagagtttcacgttgcttttcatagagtagttctgaaacatgcttttcgtagtgtctgcaagtggacatttggagcgctttcaggcctgtggtggaaaacgaattatggtcacaaaaaaactggagagaagccttctcagaaacttctctgtgatgattgcattcaactcacagagttgaaccctcctatggatagagcagtgttgaaactctctttttgtggaatctgcaagtggatatgtggatctctccaaagatgtctttggaaacgggaatatcttcacataaaaactaaacagaagcattctcagaaacttcttggtgatgtttgcattcaaatcccagagttgaaccttcctttgatagttcaggtttgaaacactctttttgtaggatctgcaagtggctatttggaccactctgtggccttcgttcgaaacgggtatatcttcgcataaaatctagacagaagcattctcagaaaatactttgtgatgattgagttaaaatcacagagctgaacattcctttggatggagcaggtttgagacacactttttgtagaatctacaagtggatatttggacctctctgaggatttcgttggaaacgggataactgcacctaactaaacggaagcattctcagaaactgctttgtgatgattgcattcacctcacagagttgaacattcctattgatagagcagtttggaaacactcttgttgtggaatgtgcaagtggagatttggagcgctttgaggcctatggtagtaaagggaatagcttcatagaaaaactagacagatgcattctcaggaactttttggtgatgtttgtattcaacccccagagttgaactttcctttggaaagagcagctatgaaacactctttttctagaatctgcaagtggacgtttggagggctttgtggtttgtggtggaaaaggaaatatcttcacctaaatactagatagaagcattctcagaagcttctctgtgatgactgcattcaactcacggagttgaacactccttttgagagcgcagttttgaaactctctttctgtggcatctgcaaggggacatgtagacctctttgaagatttcgttggaaacggaatcatcttcacataaaaactatacagaagcagtctcagaatcttctttgtgatgtttgcattcaaatcccagagttgaactttcctttcaaagttcacgtttgaaacactctttttgcaggatctacaagtggatatttggaccactctgtgtccttcgttcgaaacgggtatatcttcacacgacatctagacagaagctttctcagaaaattctttgggatgattgagtggaactcacagagctgaacattccttgcgatgtagcagtttagaaacacactttctgcagaatctgcaagtgcatatttggacctctctgaggaattcgttggaaacgggataatttcagctgactaaacagaagcattctcagaaccttcttcgtgatgtctgcattcaactcacagtgtggaacctttctttgatagttcaggtttgaaacactctttttgtagaaactgcaaggggataattgcacttctttgaggcctaccgtagtaaaggaaataacttcctatagaaagaagacagaagcattctcagaaccctcttcgtgatgtttgcattcaactcacagtgctgaacctttctttgatagttcagctttgaaacactcttcttgtagaaactgcaagtggatatttggtcctctctgaggatttcgttggaaacgggataaaccgcacagaactaaacagaagaattctcagagccctcttcgtgatgtttgcattcaactcacagtgctgaacctttctttgatagtgcagctttgaaacactctttttgtagaaactgcaagtggatgtttggtcctctctgaggatttcgttggaaacgggataaaccgcacagaactaaaacagaagcattgtcagaaacttctttgtgatgattgcattccaactcacagagttgaaggttccttttcaaacagcagtttccaatcactctttctgtggaatctgcaagtggatatttgggcctctctgaggatttcgttggaaacgggataaaacgcacagaactaaaacagaagcattctcagaaacttctctgtgatgtttgtgttcaactcccagagtttcacgttgcttttcatagagtagttctgaaacatgcttttcgtagtgtctgcaagtggacatttggagcgctttcaggcctgtggtggaaaacgaattatggtcacataaaaactggagagaagccttctcagaaacttctctgtgatgattgcattcaactcacagagttgaaccctcctatggatagagcagtgttgaaactctctttttgtggaatctgcaagtggatatgtggacctctccgaagatgtctttggaaacgggaatatcttcacataaaaactaaacagaagcattctcagaaacttcttggtgatgtttgcattcaaatcccagagttgaaccttcctttgatagttcaggtttgaaacactctttctgtaggatctgcaagtggctatttggaccactctgtggccttcgttcgaaacgggtatatcttcgcataaaatctagacagaagcattctcagaaaatactttgtgatgattgagtttaaatcacagagctgaccattcctttggatggagcaggtttgagacacactttttgtagaatctacaagtggatatttggacctctctgaggatttcgttggaaacgggataactgcacctaactaaacggaagcattctcagaaactgctttgtgatgattgcattcacctcacagagttgaacattcctattgatagagcagtttggaaacactcttgttgtggaatgtgcaagtggagatttggagcgctttgaggcctatggtagtaaagggaatagcttcatagaaaaactagacagatgcattctcaggaactttttggtgatgtttgtattcaactcccagagttgaactttcctttggaaagagcagctatgaaacactctttttctagaatctgcaagtggacgtttggagggctttgtggtttgtggtggaaaaggaaatatcttcacctaaatactagagagaagcattctcagaagcttctctgtgatgactgcattcaactcacggagttgaacactccttttgagagcgcagttttgaaactccctttctgtggcatctccaaggggacatgtagacctctttgaagatttcgttggaaacggaatcatcttcacataaaaactatacagaagcagtctcagaatcttctttgtgatgtttgcattcaaatcccagagttgaactttcctttcaaagttcacgtttgaaacactctttttgcaggatctacaagtggatatttggaccactctgtgtccttcgttcgaaacggctatatcttcacatgacatctagacagaagctttctcagaaaactctttgggatgattgagttgaactcacagagctgaacattccttgtgatgtagcagtttagaaacacactttctgcagaatctgcaagtgcatatttggacctctctgaggaattcgttggaaacgggataatttcagctgactaaacagaagcattctcagaaccttcttcgtgatgtctgcattcaactcacagtgtggaacctttctttgatagttcaggtttgaaacactctttttgtagaaactgcaaggggataattgcacttctttgaggcctaccgtagtaaaggaaataacttcctataaaaagaagacagaagcattctcagaaccctcttcgtgatgtttgcattcaactcacagtgctgaacctttctttgatagttcagctttgaaacactcttcttgtagaaactgcaagtggatatttggtcctctctgaggatttcgttggaaacgggataaaccgcacagaactaaacagaagaattctcagagccctcttcgtgatgtttgcattcaactcacagtgctgaacctttctttgatagtgcagctttgaaacactctttttgtagaaactgcaagtggatatttggtcctctctgaggatttcgttggaaacgggataaaccgcacagaactaaaacagaagcattgtcagaaacttctttgtgatgattgcattcaactcacagagttgaaggttccttttcaaacagcagtttccaatcactctttctgtggaatctgcaagtggatatttgggcctctctgaggatttcgttggaaacgggataaaacgcacagaactaaaacagaagcattctcagaaacttctctgtgatgtttgtgttcaactcccagagtttcacgttgcttttcatagagtagttctgaaacatgcttttcgtagtgtctgcaagtggacatttggagcgctttcaggcctgtggtggaaaacgaattatggtcacataaaaactggagagaagccttctcagaaacttctctgtgatgattgcattcaactcacagagttgaaccctcctatggatagagcagtgttgaaactctctttttgtggaatctgcaagtggatatgtggacctctccgaagatgtctttggaaacgggaatatcttcacataaaaactaaacagaagcattctcagaaacttcttggtgatgtttgcattcaaatcccagagttgaaccttcctttgatagttcaggtttgaaacactctttctgtaggatctgcaagtggctatttggaccactctgtggccttcgttcgaaacgggtatatcttcgcataaaatctagacagaagcattctcagaaaatactttgtgatgattgagtttaaatcacagagctgaccattcctttggatggagcaggtttgagacacactttttgtagaatctacaagtggatatttggacctctctgaggatttcgttggaaacgggataactgcacctaactaaacggaagcattctcagaaactgctttgtgatgattgcattcacctcacagagttgaacattcctattgatagagcagtttggaaacactcttgttgtggaatgtgcaagtggagatttggagcgctttgaggcctatggtagtaaagggaatagcttcatagaaaaactagacagatgcattctcaggaaccttttggtgatgtttgtattcaactcccagagttgaactttcctttggaaagagcagctatgaaacactctttttctagaatctgcaagtggacgtttggagggctttgtggtttgtggtggaaaaggaaatatcttcacctaaatactagatagaagcattctcagaagcttctctgtgatgactgcattcaactcacggagttgaacactccttttgagagcgcagttttgaaactctctttctgtggcatctgcaaggggacatgtagacctctttgaagatttcgttggaaacggaatcatcttcacataaaaactatacagaagcagtctcagaatcttctttgtgatgtttgcattcaaatcccagagttgaactttcctttcaaagttcacgtttgaaacactctttttgcaggatctacaagtggatatttggaccactctgtgtccttcgttcgaaacgggtatatcttcacacgacatctagacagaagctttctcagaaaattctttgggatgattgagtggaactcacagagctgaacattccttgcgatggagcagtttagaaacacactttctgcagaatctgcaagtgcatatttggacctctctgaggaattcgttggaaacgggataatttcagctgactaaacagaagcattctcagaacttcttcgtgatgtctgcattcaactcacagtgtggaacctttctttgatagttcaggtttgaaacactctttttgtagaaactgcaaggggataattgcacttctttgaggcctaccgtagtaaaggaaataacttcctatagaaagaagacagaagaattctcagagccctcttcgtgatgtttgcattcaactcacagtgctgaacctttctttgatagtgcagctttgaaacactctttttgtagaaactgcaattggatgtttggtcctctctgaggatttcgttggaaacgggataaaccgcacagaactaaaacagaagcattctcagaacttcttcgtgatgtttgcattcaactcacagtgttgaacctttctttgatagttcaggttggaaacggtctttctgtagaaactgcaagtagatatttggacctctctgaggatttcgttggaaacgggataaaccgcacagaactaaaacagaagcattcacagaaaactcttggtgacgactgagtttaactcatagagctgaacattcctttggatggagcagtttcgaaacacactatttgtagaatgtgcaagtggatatttgggcctctctgaggatttcgttggaaacgggataaaccgcacagaactaaacagaagcattctcagaaactactttgtgatgattgcattcaagtcacagagttgaacattccctttgacagagcagtttggaaactctctttgtgtagaatctgcaagtggagatatggaccgctttgaggcctatggtagtaaaggaaatagcttcatataaaagctagacagtagcattctcagaaacttctttgtgatgcttgcattcaactcacagagttgaactttcctttcgagagagaagctttgaaacactctttttccagaatctgcaagtggacatttggagggctttgaggcctgtggtggaaaaggaattatcttcccgtaaaagctagatagaagcattgtcagaaacttctttgtgatgattgcattcaactcacagggttgaaggttccttttcaaagagcagtttccaatcactctttctgtggaatctgcaagtggatatttggacctattttgaagatttcgttggaaacgggagaatcttcacaggaaagctaaacagaagcattctcagaaacttctctgtgatgtttgtgttcaactcccagagtttcacgttgcttttcatagagtagttctgaaacatgcttttcgtagtgtctgcaagtggacatttggagcgctttcaggcctgtggtggaaaacgaattatggtcacataaaaactggagagaagccttctcagaaacttctctgtgatgattgcattcaactcacagagttgaaccctcctatggatagagcagtgttgaaactctctttttgtggaatctgcaagtggatatgtggacctctccgaagatgtctttggaaacgggaatatcttcacataaaaactaaacagaagcattctcagaaacttcttggtgatgtttgcattcaaatcccagagttgaaccttcctttgatagttcaggtttgaaacactctttctgtaggatctgcaagtggctatttggaccactctgtggccttcgttcgaaacgggtatatcttcgcataaaatctagacagaagcattctcagaaaatactttgtgatgattgagtttaaatcacagagctgaccattcctttggatggagcaggtttgagacacactttttgtagaatctacaagtggatatttggacctctctgaggatttcgttggaaacgggataactgcacctaactaaacggaagcattctcagaaactgctttgtgatgattgcattcacctcacagagttgaacattcctattgatagagcagtttggaaacactcttgttgtggaatgtgcaagtggagatttggagcgctttgaggcctgtggtagtaaagggaatagcttcatagaaaaactagacagatgcattctcaggaactttttggtgatgtttgtattcaactcccagagttgaactttcctttggaaagagcagctatgaaacactctttttctagaatctgcaagtggacgtttggagggctttgtggtttgtggtggaaaaggaaatatcttcacctaaatactagatagaagcattctcagaagcttctctgtgatgactgcattcaactcacggagttgaacactccttttgagagcgcagttttgaaactctctttctgtggcatctgcaaggggacatgtagacctctttgaagatttcgttggaaacggaatcatcttcacataaaaactatacagaagcagtctcagaatcttctttgtgatgtttgcattcaaatcccagagttgaactttcctttcaaagttcacgtttgaaacactctttttgcaggatctacaagtggatatttggaccactctgtgtccttcgttcgaaacgggtatatcttcacacgacatctagacagaagctttctcagaaaattctttgggatgattgagtggaactcacagagctgaacattccttgcgatgtagcagtttagaaacacactttctgcagaatctgcaagtgcatatttggacctctctgaggaattcgttggaaacgggataatttcagctgactaaacagaagcattctcagaaccttcttcgtgatgtctgcattcaactcacagtgtggaacctttctttgatagttcaggtttgaaacactctttttgtagaaactgcaaggggataattgcacttctttgaggcctaccgtagtaaaggaaataacttcctatagaaagaagacagaagcattctcagaaccctcttcgtgatgtttgcattcaactcacagtgctgaacctttctttgatagttcagctttgaaacactcttcttgtagaaactgcaagtggatatttggtcctctctgaggatttcgttggaaacgggataaaccgcacagaactaaacagaagaattctcagagccctcttcgtgatgtttgcattcaactcacagtgctgaacctttctttgatagtgcagctttgaaacactctttttgtagaaactgcaagtggatgtttggtcctctctgaggatttcgttggaaacgggataaaccgcacagaactaaaacagaagcattcacagaaaactcttggtgacgactgagtttaactcacagagctgaacattcctttggatggagcagtttcgaaacacactatttgtagaatctgcaagtggatatttgggcctctctgaggatttcgttggaaacgggataaaacgcacagaactaaaacagaagcattctcagaaactactttgtgatgattgcattcaagtcacagagttgaacattccctttgacagagcagtttggaaactctctttgtgtagaatctgcaagtggagatatggaccgctttgaggcctatggtagtaaaggaaatagcttcatataaaagctagacagtagcattctcagaaacttctttgtgatgcttgcattcaactcacagagttgaactttcctttcgagagagaagctttgaaacactctttttccagaatgtgcaagtggacatttggggagctttgaggcctggggtggaaaaggaattatcttcccgtaaaagctagatagaagcattgtcagaaacttctttgtgatgattgcattcaactcacagagttgaaggttccttttcaaacagcagtttccaatcactctttctgtggaatctgcaagtggatatttcgacctctttgaagatttcgttggaaacgggagaatcttcccagaaaagctaaacagaagcattctcagaaacttctctgtgatgtttgtgttcaactcccagagtttcacgttgcttctcatagagtagttctgaaacatgcttttcgtagtgtctgcaagtggacatttggagcgctttcaggcctgtggtggaaaacgaattatggtcacataaaaactggagagaagccttctcagaaacttctctgtgatgattgcattcaactcacagagttgaaccctcctatggatagagcagtgttgaaactctctttttgtggaatctgcaagtggatatgtggacctctccgaagatgtctttggaaacgggaatatcttcacataaaactaaacagaagcattctcagaaacttcttggtgatgtttgcattcaaatcccagagttgaaccttcctttgagagttcaggtttgaaacactctttttgtaggatctgcaagtggatatttggaccactctgtggccttcgttcgaaacgggtacatcttcgcataaaatactagacagaagcattctcagaaaatactttgtgatgattgagttgaactcacagagctgaacattcctttggatggagcaggtttgagacacactttttgtagaatctacaagtggatatttggacctctctgaggatttcgttggaaacgggataactgcacctaactaaacggaagcattctcagaaactgctttgtgatgattgcattcacctcacagagttgaacattcctattgatagagcagtttggaaacactcttgttgtggaacgtgcaagtggagatttggagcgctttgaggcctatggtagtaaagggaatagcttcatagaaaaactagacagatgcattctcaggaactttttggtgatgtttgtattcaacacccagagttgaactttcctttggaaagagcagctatgaaacactctttttctagaatctgcaagtggacgtttggagggctttgtggtttgtggtggaaaaggaaatatcttcacctaaatactagcatagaagcattctcagaagcttctctgtgatgactgcattcaactcacggagttgaacactccttttgagagtgcagttttgaaactctctttctgtgacatctgcaaggggacatgtagacctctttgaagatttcgttggaaacggaatcatcttcacataaaaactatacagaagcagtctcagaatcttctttgtgatgtttgcattcaaatccccgagttgaactttcctttcaaagttcacgtttgaaacactctttttgcaggatctacaagtggatatttggaccactctgtgtccttcgttcgaaacgggtatatcttcacatgacatctagacagaagctttctcagaaaattctttgggatgattgagttgaactcacagagctgagcattccttgcgatgtagcagtttagaaacacactttctgcagaatctgcaagtgcatatttggacctctgtgaggaattcgttggaaacgggataatttcagctgactaaacagaagcattctcagaaccttcttcgtgatgtctgcattcaactcacagtgtggaacctttctttgatagttcaggtttgaaacactctttttgtagaaactgcaaggggatcattgcactctttgaggagtaccgtagtaaaggaaataacttcctataaaaagaagacagaagcattctcagaaccctcttctgtgatgtttgcattcaactcacagtgctgaacctttctttgatagttcagctttgaaacactcttcttgtagaaactgcaagtggatatttggtcctctctgaggatttcgttggaaacgggataaaccgcacagaactaaacagaagcattctcagaaccttcttcgtgatgtttgcattcaactcacagtgttgaacctttctttgatagttcaggtttgaaacggtctttctgtagaaactgcaagtagatatttggacctctctgaggatttcgttggaaacgggataacccgcacagaactaaaacagaagcattcacagaaaactcttggtgacgactgagtttaactcacagagctgaacattcctttggatggagcagtttcgaaacacactatttgtagaatgtgcaagtggatatttaggcctctctgaggatttcgttggaaacgggataaaccgcacagaactaaacagaagcattctcagaaactgctttgtggtgattgcattcaagtcacagatttgaacattccctttgacagagcagtttggaaactctctttgtgtagaatctgcaagtggagatatggaccgctttgaggcctatggtagtaaaggaaatagcttcatataaaagctagacagtaggcattctcagaaacttctttgtgatgcttgcattcaactcacagagttgaactttcctttcgagagagaagctttgaaacactcgttttccagaatctgcaagtggacatttggagggctttgaggcctgtggtggaaaaggaattatcttcccgttaaagctagatagaagcattgtcagaaacttctttgtgatgattgcattcaacacacagagttgaaggttccttttcaaagagcagtttccaatcactctttctgtggaatctgaaagtggatatttggacctctttgaagatttcgttggaaacgggagaatcttcacagaaaagctaaacagaagcattctcagaaacttctctgtgatgtttgtgttcaactcccagagtttcacattgcttttcatagagtagttctgaaacatgcttttcgtagtgtctacaagtggacatttggagcgctttcaggcctgtggtggaaaacgaattatggtcacataaaaactggagagaagccttctcagaaacttctctgtgatgattgcattcaactcacagagttgaaccctcctatggatagagcagtgttgaaactctctttttgtggaatctgcaagtggatatgtggacctctccgaagatgtctttggaaacgggaatatcttcacataaaaactaaacagaagcattctcagaaacttcttggtgatgtttgcattcaaatgccagagttgaaccttcctttgatagttcaggtttgaaacactctttttgtaggatctgcaagtggatatttggaccactctgtggccttcgttcgaaacgggtatatcttcgcataaaatctagacagaagcattctcagaaaatactttgtgatgattgagtttaactcacagagctgaacattcctttggatggagcaggtttgagacacactttttgtagaatctacaagtggatatttggacctctctgaggatttcgttggaaacgggataactgcacctaactaaacggaagcattctcagaaactgctttgtgatgattgcattcacctcacagagttaaacattcctattgatagagcagtttggaaacactcttcttgtggaatgtgcaagtggagatttggtgcgctttgatgcctatggtagtaaagggaatagcttcatagaaaaactagacagatgcattctcaggaactttttggtgatgtttgtattcaactcccagagttgaactttcctttggaaagagcagctatgaaacactctttttctagaatctgcaagtggacgtttggagggctttgtggtttgtggtggaaaaggaaatatcttcacctaaatactagatagaagcattctcagaagcttctctgtgatgactgcattcaactcacggagttgaacactccttttgagagcgcagttttgaaactctctttctgtggcatctgcaaggggacatgtagacctctttgaagatttcgttggaaacggaatcatcttcacataaaaactatacagaagcagtctcagaatcttctttgtgatgtttgcattcaaatcccagagttgaactttcctttcaaagttcacgtttgaaacactctttttgcaggatctacaagtggatatttggaccactctgtgtccttcgttcgaaacgggtatatcttcacacgacatctagacagaagctttctcagaaaattctttgggatgattgagtggaactcacagagctgaacattccttgcgatgtagcagtttagaaacacactttctgcagaatctgcaagtgcatatttggacctctctgaggaattcgttggaaacgggataatttcagctgactaaacagaagcattctcagaaccttcttcgtgatgtctgcattcaactcacagtgtggaacctttctttgatagttcaggtttgaaacactctttttgtagaaactgcaaggggataattgcacttctttgaggcctaccgtagtaaaggaaataacttcctatagaaagaagacagaagcattctcagaaccctcttcgtgatgtttgcattcaactcacagtgctgaacctttctttgatagttcagctttgaaacactcttcttgtagaaactgcaagtggatatttggtcctctctgaggatttcgttggaaacgggataaaccgcacagaactaaacagaagaattctcagagccctcttcgtgatgtttgcattcaactcacagtgctgaacctttctttgatagtgcagctttgaaacactctttttgtagaaactgcaagtggatgtttggtcctctctgaggatttcgttggaaacgggataaaccgcacagaactaaaacagaagcattgtcagaaacttctttgtgatgattgcattcaactcacagagttgaaggttccttttcaaacagcagtttccaatcactctttctgtggaatctgcaagtggatatttgggcctctctgaggatttcgttggaaacgggataaaacgcacagaactaaaacagaagcattctcagaaacttctctgtgatgtttgtgttcaactcccagagtttcacgttgcttttcatagagtagttctgaaacatgcttttcgtagtgtctgcaagtggacatttggagcgctttcaggcctgtggtggaaaacgaattatggtcacataaaaactggagagaaagccttctcagaaacttctctgtgatgattgcattcaactcacagcagttgaaccctcctatggatagagcagtgttgaaactctctttttgtggaatctgcaagtggatatgtggacctctccgaagatgtctttggaaacgggaatatcttcacataaaaactaaacagaagcattctcagaaacttcttggtgatgtttgcattcaaatcccagagttgaaccttcctttgatagttcaggtttgaaacactctttctgtaggatctgcaagtggctatttggaccactctgtggccttcgttcgaaacgggtatatcttcgcataaaatctagacagaagcattctcagaaaatactttgtgatgattgagtttaaatcacagagctgaccattcctttggatggagcaggtttgagacacactttttgtagaatctacaagtggatatttggacctctctgaggatttcgttggaaacgggataactgcacctaactaaacggaagcattctcagaaactgctttgtgatgattgcattcacctcacagagttgaacattcctattgatagagcagtttggaaacactcttgttgtggaatgtgcaagtggagatttggagcgctttgaggtctatggtagtaaagggaatagcttcatagaaaaactagacagatgcattctcaggaactttttggtgatgtttgtattcaactcccagagttgaactttcctttggaaagagcagctatgaaacactctttttctagaatctgcaagtggacgtttggagggctttgtggtttgtggtggaaaaggaaatatcttcacctaaatactagatagaagcattctcagaagcttctctgtgatgactgcattcaactcacggagttgaacactccttttgagagcgcagttttgaaactctccttctgtggcatccgcaaggggacatgtggacctctttgaagatttcgttggaaacggaatcatcttcacatcaaaactatacagaagcagtctcagaatcttctttgtgatgtttgcattcaaatcccagagttgaactttcctttcaaagttcacgtttgaaacactctttttgcaggatctacaagtggatatttggaccactctgtgtccttcgttcgaaacgggtatatcttcacatgacagctagacagaagctttctcagaaaattctttgggatgattgagtggaactcacagagctgaacattccttgcgatgtagcagtttagaaacacactttctgcagaatctgcaagtgcatatttggacctctctgaggagttcgttggaaacgggataatttcagctgactaaacagaagcattctcagaaccttcttcgtgatgtctgcattcaacttacagtgtggaacctttctttgatagttcaggtttgaaacactctttttgtagaaactgcaaggggataattgcacttctttgaggcctaccgtagtaaaggaaataacttcctatagaaagaagacagaagcattctcaggaccctcttcgtgatgtttgcattcaactcacagtgctgaacctttctttgatagttcagctttgaaacactcttcttgtagaaactgcaagtggatatttggtcctctctgaggatttcgttggaaacgggataaaccgcacagaactaaacagaagcattctcagaaccttcttcgtgatgtttgcattcaactcacagtgttgaacctttctttgatagttcaggtttgaaacggtctttctgtagaaactgcaagtagatatttggacctctctgaggatttcgttggaaacgggataaaccgcacagaactaaaacagaagcattcacagaaaactcttggtgacgactgagtttaactcacagagctgaacattcctttggatggagcagtttcgaaacacactatttgtagaatgtgcaagtggatatttgggcctctctgaggatttcgttggaaacgggataaaccgcacagaactaaacagaagcattctcagaaactactttgtgacgattgcattcaagtcacagagttgaacattccctttgacagagcagtttggaaactctctttgtgtagaatctgcaagtggagatatggaccgctttgaggcctatggtagtaaaggaaatagcttcatataaaagctagacagtagcattctcagaaacttctttgtgatgcttgcattcaactcacagagttgaactttcctttcgagagagaagctttgaaacactctttttccagaatctgcaagtggacatttggagggctttgaggcctgtggtggaaaaggaattaacttcccgtaaaagctagatagaagcattgtcagaaacttctttgtgatgattgcattcaactcacagagatgaaggttcctttacaaacagcagtttccaaacactctttctgtggaatctgcaagtggatatttggacctctttgaagatttcgttggaaacgggagaatcttcacagaaaagctaaacagaagcattctcagaaacttctctgtgatgtttgtgttcaactcccagagtttcacattgcttttcatagagtagttctgaaacatgcttttcgtagtgtctgcaagtggacatttggagcgctttcaggcctgtggtggaaaacgaattatggtcacataaaaactggagagaagccttctcagaaacttctctgtgatgattgcattcaactcacagagttgaaccctcctatggatagagcagtgttgaaactctctttttgtgtaatctgcaagtggatatgtggacctctccgaagatgtctttggaaacgggaatatcttcacataaaaactaaacagaagcattctcagaaacttcttggtgatgtttgcattcaaatcccagagttgaaccttcctttgatagttcaggtttgaaacactctttttgtaggatctgcaagtggatatttggaccactctgtggccttctttcgaaacgggtatatcttcgcataaaatctagacagaagcattctcagaaaatactttgtgatgattgagtttaaatcacagagctgaacattcctttggatggagcaggtttgagacacactttttgtagaatctacaagtggatatttggacctctctgaggatttcgttggaaacgggataactgcacctaactaaacggaagcattctcagaaactgctttgtgatgattgcattcacctcacagagttgaacattcctattgatagagcagtttggaaacactcttgttgtggaatgtgcaagtggagatttggagcgctttgaggcctatggtagtaaagggaatagcttcatagaaaaactagacagatgcattctcaggaactttttggtgatgtttgtattcaactcccagagttgaactttcctttggaaagagcagctatgaaacactctttttctagaatctgcaagtggacgtttggagggctttgtggtttgtggtggaaaaggaaatatcttcacctaaatactagatagaagcattctcagaagcttctctgtgatgactgcattcaactcacggagttgaacactccttttgagagcgcagttttgaaactctctttctgtggcatccgcaaggggacatgtggacctctttgaagatttcgttggaaacggaatcatcttcacataaaaactatacagaagcagtctcagaatcttctttgtggtgtttgcattcaaatcccagagttgaactttcctttcaaagttcacgtttgaaacactctttttgcaggatctacaagtggatatttggaccactctgtgtccttcgttcgaaacgggtatatcttcacatgacatctagacagaagctttctcagaaaattctttgggatgtttgagttgaactcacagagctgaacatttcttgcgatggagcagtttagaaacacactttctgcagaatctgcaattgcatatttggacctctctgaggaattcgttggaaacgggataatttcagctgactaaacagaagcattctcagaaccttcttcgtgatgtctgcattcaactcacagtgtggaacctttctttgatagttcaggtttgaaacactctttttgtagaaactgcaaggggataattgcacttctttgaggcctaccgtagtaaaggaaataacttcctataaaaagaagacagaagcattctcagaaccctcttcgtgatgtttgcattcaactcacagtgctgaaactttctttgatagttcagctttgaaaaactctttttgtagaaactgcaagtggatatttggtcctctctgaggatttcgttggaaacgggataaaccacacagaactaaacagaagcattcacagaaaactcttggtgacgactgagtttaactcacagagctggacattcctttggatggagcagtttcgaaacacactatttgtagaatctgcaagtggatatttgggcctctctgaggatttcgttggaaacgggataaaccgcacagaactaaaacagaagcattctcagaaactactttgtgatgattgcattcaagtcacagagttgaacattccctttgacagagcagtttggaaactctctttgtgtagaatctgcaagtggagatatggaccgctttgaggcctatggtagtaaaggaaatagcttcatataaaagctagacagtagcattctcagaaacttctttgtgatgcttgcattcaactcacagagttgaactttcctttcgagagagaagctttgaaacactctttttccagaatgtgcaagtggacatttggggagctttgaggcctggggtggaaaaggaattatcttcccgtaaaagctagatagaagcattgtcagaaacttctttgtgatgattgcattcaactcacagagttgaaggttccttttcaaacagcagtttccaatcactctttctgtggaatctgcaagtggatatttcgacctctttgaagatttcgttggaaacgggagaatcttcacagaaaagctaaacagaagcattctcagaaacttctctgtgatgtttgtgttcaactcccagagtttcacgttgcttttcatagagtagttctgaaacatgcttttcgtagtgtctgcaagtggacatttggagcgctttcaggcctgtggtggaaaacgaattatggtcacagaaaaactggagagaagccttctcagaaacttctctgtgatgattgcattcaactcacagagttgaaccctcctatggatagagcagtgttgaaactctctttttgtggaatctgcaagtggatatgtggacctctccgaagatgtctttggaaacgggaatatcttcacataaaaactaaacagaagcattctcagaaacttcttggtgatgtttgcattcaaatcccagagttgaaccttcctttgatagttcaggtttgaaacactctttttgtaggatctgcaagtggctatttggaccactctgtggccttcgttcgaaacgggtatatcttcgcataaaatctagacagaagcattctcagaaaatactttgtgatgattgagttgaactcacagagctgaacattcctttggatggagcaggtttgagacacactttttgtagaatctacaagtggatatttggacctctctgaggatttcgttggaaacgggataactgcacctaactaaacggaagcattctcagaaactgctttgtgatgattgcattcacctcacagagttgaacattcctattgatagagcagtttggaaacactcttgttgtggaatgtgcaagtggagatttggagcgctttgaggcctatggtagtaaagggaatagcttcatagaaaaactagacagatgcattctcaggaactttttggtgatgtttgtattcaactcccagagttgaactttcctttggaaagagcagctatgaaacactctttttctagaatctgcaagtggacgtttggagggctttgtggtttgtggtggaaaaggaaatatcttcacctaaatactagagagaagcattctcagaagcttctctgtgatgactgcattcaactcacggatttgaacactccttttgagagcgcagttttgaaactccctttctgtggcatctgcaaggggacatgtagacctctttgaagatttcgttggaaacggaatcatcttcacataaaaactatacagaagcagtctcagaatcttctttgtgatgtttgcattcaaatcccagagttgaactttcctttcaaagttcacgtttgaaacactctttttgcaggatctacaagtggatatttggaccactctgtgtccttcgttcgaaacgggtatatcttcacatgacatctagacagaagctttctcagaaaattctttgggatgattgagtggaactcacagagctgaacattccttgcgatgtagcagtttagaaacacactttctgcagaatctgcaagtgcatatttggacctctctgaggaattcgttggaaacgggataatttcagctgactaaacagaagcattctcagaaccttcttcgtgatgtctgcattcaactcacagtgtggaacctttctttgatagttcaggtttgaaacactctttttgtagaaactgcaaggggataattgcacttttttgaggcctaccgtagtaaaggaaataacttcctatagaaagaagacagaagcattctcagaaccctcttcgtgatgtttgcattcaacccacagtgctgaacctttctttgatagttcagctttgaaacactcttcttgtagaaactgcaagtggatatttggtcctctctgaggatttcgttggaaacgggataaaccgcacagaactaaacagaagaattctcagagccctcttcgtgatgtttgcattcaactcacagtgctgaacctttctttgatagtgcagctttgaaacactctttttgtagaaactgcaagtggatatttggtcctctctgaggatttcgttggaaacgggataaaccgcacagaactaaaacagaagcattgtcagaaacttctttgtgatgattgcattcaactcacagagttgaaggttccttttcaaacagcagtttccaatcactctttctgtggaatctgcaagtggatatttgggcctctctgaggatttcgttggaaacgggataaaacgcacagaactaaaacagaagcattctcagaaacttctctgtgatgtttgtgttcaactcccagagtttcacgttgcttttcatagagtagttctgaaacatgcttttcgtagtgtctgcaagtggacatttggagcgctttcaggcctgtggtggaaaacgaattatggtcacataaaaactggagagaagccttctcagaaacttctctgtgatgattgcattcaactcacagagttgaaccctcctatggatagagcagtgttgaaactctctttttgtggaatctgcaagtggatatgtggacctctccgaagatgtctttggaaacgggaatatcttcacataaaaactaaacagaagcattctcagaaacttcttggtgatgtttgcattcaaatcccagagttgaaccttcctttgatagttcaggtttgaaacactctttttgtaggatctgcaagtggctatttggaccactctgtggccttcgttcgaaacgggtatatcttcgcataaaatctagacacaagcattctcagaaaatactttgtgatgattgagtttaaatcacagagctgaacattcctttggatggagcaggtttgagacacactttttgtagaatctacaagtggatatttggacctctctgaggatttcgttggaaacgggataactgcacctaactaaacggaagctttctcagaaactgctttgtgatgattgcattcacctcacagagttgaacattcctattgatagagcagtttggaaacactcttgttgtggaatgtgcaagtggagatttggagcgctttgaggcctatggtagtaaagggaatagcttcatagaaaaactagacagatgcattctcaggaactttttggtgatgtttgtattcaactcccagagttgaactttcctttggaaagagcagctatgaaacactctttttctagaatctgcaagtggacgtttggagggctttgtggtttgtggtggaaaaggaaatatcttcacctaaatactagacagaagcattctcagaagcttctctgtgatgactgcattcaactcacggagttgaacactccttttgagagcgcagttttgaaactctctttctgtggcatctgcaaggggacatgtagacctctttgaagatttcgttggaaacggaatcatcttcacataaaaactatacagaagcagtctcagaatcttctttgtgatgtttgcattcaaatcccagagttgaactttcctttcaaagttcacgtttgaaacactctttttgcaggatctacaagtggatatttggaccactctgtgtccttcgttcgaaacgggtatatcttcacacgacatctagacagaagctttctcagaaaattctttgggatgattgagtggaactcacagagctgaacattccttgcgatggagcagtttagaaacacactttctgcagaatctgcaagtgcatatttggacctctctgaggaattcgttggaaacgggataatttcagctgactaaacagaagcattctcagaaccttcttcgtgatgtctgcattcaactcacagtgtggaacctttctttgatagttcaggtttgaaacactctttttgtagaaactgcaaggggataattgcacttctttgaggcctaccgtagtaaaggaaataacttcctatagaaagaagacagaagcattctcagagccctcttcgtgatgtttacattcaactcacagtgctgaacctttctttgatagtgcagctttgaaacactctttttgtagaaactgcaagtggatgtttggtcctctctgaggatttcgttggaaacgggataaaccgcacagaactaaaacagaagcattgtcagaaacttctttgtgatgattgcattcaactcacagagttgaaggttccttttcaaacagcagtttccaatcactctttctgtggaatctgcaagtggatatttgggcctctctgaggatttcgttggaaacgggataaaacgcacagaactaaaacagaagcattctcagaaacttctctgtgatgtttgtgttcaactcccagagtttcacgttgcttttcatagagtagttctgaaacatgcttttcgtagtgtctgcaagtggacatttggagcgctttcaggcctgtggtggaaaacgaattatggtcacataaaaactggagagaagccttctcagaaacttctctgtgatgattgcattcaactcacagagttgaaccctcctatggatagagcagtgttgaaactctctttttgtggaacctgcaagtggatatgtggacctctccgaagatgtctttggaaacgggaatatcttcacataaaaactaaacagaagcattctcagaaacttcttggtgatgtttgcattcaaatcccagagttgaaccttcctttgatagttcaggtttgaaacactctttctgtaggatctgcaagtggctatttggaccactctgtggccttcgttcgaaacgggtatatcttcgcataaaatctagacagaagcattctcagaaaatactttgtgatgattgagtttaaatcacagagctgaccattcctttggatggagcaggtttgagacacactttttgtagaatctacaagtggatatttggacctctctgaggatttcgttggaaacgggataactgcacctaactaaacggaagcattctcagaaactgctttgtgatgattgcattcacctcacagagttgaacattcctattgatagagcagtttggaaacactcttgttgtggaatgtgcaagtggagatttggaagcgctttgaggcctgtggtagtaaagggaatagcttcatagaaaaactagacagatgcattctcaggaactttttggtgatgtttgtattcaactcccagagttgaactttcctttggaaagagcagctatgaaacactgtttttctagaatctgcaagtggacgtttggagggctttgtggtttgtggggaaaaggaaatatcttcacctaaatactagatagaagcatcctcagaagcttctctgtgatgactgcattcaactcacggagttgaacactccttttgagagcgcagttttgaaactctctttctgtggcatctgcaaggggacatgtagacctctttgaagatttcgttggaaacggaatcatcttcacataaaaactatacagaagcagtctcagaatcttctttgtgatgtttgcattcaaatcccagagttgaacttgcctttcaaagttcacgtttgaaacactctttttgcaggatctacaagtggatatttggaccactctgtgtccttcgttcgaaacgggtatatcttcacatgacatctagacagaagctttctcagaaaattctttgggatgattgagttgaactcacagagctgagcattccttgcgatgtagcagtttagaaacacactttctgcagaatctgcaagtgcatatttggacctctctgaggaattcgttggaaacgggataatttcagctgactaaacagaagcattctcagaaccttcttcgtgatgtctgcattcaactcacagtgtggaacctttctttgatagttcaggtttgaaacactctttttgtagaaactgcaaggggataattgcactctttgaggagtaccgtagtaaaggaaataacttcctataaaaagaagacagaagcattctcagaaccctcttcgtgatgtttgcattcaactcacagtgctgaacctttctttgatagttcagctttgaaacactctttttgtagaaactgcaagtgtatatttggtcctctctgaggatttcgttggaaacgggataaaccgcacagaactaaacagaaagcattctcagaaccttcttcgtgatgtttgcattcaactcacagtgttgaacctttctttgatagttcaggtttgaaacggtctttctgtagaaactgcaagtagatatttggacctctctgaggatttcgttggaaacgggataacccgcacagaactaaaacagaagcattcacagaaaactcttggtgacgactgagtttaactcacagagctgaacattcctttggatggagcagtttcgaaacacactatttgtagaatgtgcaagtggatatttgggcctctcctgaggatttcgttggaaacgggataaaccgcacagaactaaacagaagcattctcagaaactactttgtgatgattgcattcaagtcacagagttgaacattccctttgacagagcagtttggaaactctctttgtgtagaatctgcaagtggagatatggaccgctttgaggcctatggtagtaaaggaaatagcttcatataaaagctagacagtagcattctcagaaacttctttgtgatgcttgcattcaactcacagagttgaactttcctttcgagagagaagctttgaaacactctttttccagaatctgcaagtggacatttggagggctttgaggcctgtggtggaaaaggaattatcttcccgtaaaagctagatagaagcattgtcagaaacttctttgtgatgattgcattcaactcacagagttgaaggttccttttcaaagagcagtttccaatcactctttctgtggaatctgcaagtggatatttcgacctattttgaagatttcgttggaaacgggataatcttcacagaaaagctaaacagaagcattctcagaaacttctctgtgatgtttgtgttcaactcccagagtttcacattgcttttcatagagtagttctgaaacatgcttttcgtagtgtctacaagtggacatttggagcgcttccaggcctgtggtggaaaacgaattatggtcacataaaaactggagagaagccttctcagaaacttctctgtgatgattgcattcaactcacagagttgaaccctcctatggatagagcagtgttgaaactctctttttgtggaatctgcaagtggatatgtggacctctttgaagatgtctttggaaacgggaatatcttcacataaaaactaaacggaaggattctcagaaacttcttggtgatgtttgcattcaaatcccagagttgaaccttcctttgatagttcaggtttgaaacactctttttgtaggatctgcaagtggctatttggaccactctgtggcattctttcaaaacgggtatatcttcgcataaaatctagacagaagcattctcagaaaatactttgtgatgattgagttgaactcacagagctgaacattcctttggatggagcaggtttgagacacactttttgtagaatctacaagtggatatttggacctctctgaggatttcgttggaaacgggataactgcacctaactaaacggaagcattctcagaaactgctttgtgatgattgcattcacctcacagagttgaacattcctattgatagagcagtttggaaacactcttgttgtggaatgtgcaagtggagatttggagtgctttgaggcctatggtagtaaagggaatagcttcatagaaaaactagacagatgcattctcaggaactttttggtgatgtttgtattcaactcccagagttgaactttcctttggaaagagcagctatgaaacactgtttttctagaatctgcaagtggacgtttggagggctttgtggtttgtggtggaaaaggaaatatcttcacctaaatactagatagaagcatcctcagaagcttctctgtgatgactgcattcaactcacggagttgaacactccttttgagagcgcagttttgaaactctctttctgtggcatctgcaaggggacatgtagacctctttgaagatttcgttggaaacggaatcatcttcacataaaaactacacagaagcagtctcagaatcttctttgtgatgtttgcattcaaatccccgagttgaactttcctttcaaagttcacgtttgaaacactctttttgcaggatctacaagtggatatttggaccactctgtgtccttcgttcgaaacgggtatatcttcacatgacatctagacagaagctttctcagaaaattctttgggatgattgagttgaactcacagagctgagcattccttgcgatgtagcagtttagaaacacactttctgcagaatctgcaagtgcatatttggacctctgtgaggaattcgttggaaacgggataatttcagctgactaaacagaagcattctcagaaccttcttcgtgatgtctgcattcaactcacagtgtggaacctttctttgatagttcaggtttgaaacactctttctgtagaaactgcaaggggataattgcactctttgaggagtaccgtagtaaaggaaataacttcctataaaaagaagacagaagcattctcagaaccctcttcgtgatgtttgcattcaactcacagtgctgaacctttctttgatagttcagctttgaaacactcttttt
